United States Patent Application Publication US 2022/0167576 A1 - sequence listing, part 13

SEQ ID NO: 30 - DNA, 35937250 bp, Oryza sativa (residues 25,367,473-27,481,428 of 35,937,250)
  misc_feature (5969519)..(5970518): n is a, c, g, or t
  misc_feature (13681864)..(13682863): n is a, c, g, or t
  misc_feature (13684155)..(13684254): n is a, c, g, or t
  misc_feature (18795366)..(18796365): n is a, c, g, or t
  misc_feature (24815509)..(24816508): n is a, c, g, or t
  misc_feature (35936251)..(35937250): n is a, c, g, or t
gggtcaaatttctgcatctagagtagagtgcccagagtttgcaggggaaaatcctaaggcctggaaactgaagtgtgagacttattttgggctgtgtggaactccttctgatcactggattggtgtggcgatactccagttctcgggtactgcattgacttggttgcagtcgacccgagctcatgaagttagtgggagttgggaggaattcgctgcctgggtgtgtgggaaatttggtagagaggagttccaaagtttgattcgacagttcaataggttaaggcaaactagcactgtgtgggcatatgcagaaaagttcaacgagttgatgcatgggttacatgcgcatcatccctcgtggaattcggttttctttgttactcagttcatggatgggttgaaggcagaagtgagatctgctgttgttttacattgcccaaccgatttggatactgccgtggaattagcttgtttgcaagaggaagtactggaacagaatcgcaaggaggggcgtcgctttgagccgactgggggagcccgaggacccttgcacactggtgttggaccttttgtgccaaagggagatgataagctaactactgaagtttctgctactgataaagttgcagctctcagggctttccatcgagcgaaggggctttgtcacacttgcggggaaaagtggagtcgtgatcatcgttgtggccctactgtgcagctgcatgtgattgaagaagtgctacagcttttttctgatgaggttcctgaggaagtggagtcatctactagccccctgctgaatcagatgatggtgagttattggccatttctcgagaagctgtacttggtattgagtcttctcgtatggtgcgtttgtaaggattgatccaacgacatgaggtcttgatgttggttaattcaggaagctctcacagctttatcagtgagaagttagctaataaactgcagggtgtgcgcagctcgctgactcctctgaaggtgaaaatcgcggatggtggtatcttgcaatgttgtcaggagtttcctaattgtcattggtgggtacaaggggagtccttcagcactaatcttaaggtgttaccgttgggctgttatgaggtcattctgggcatggattggttagagaaacacagtccaatgcaaattgattggaagcttaagaccatacaatttgtgttggacagcaggcaggttctgttacagggtgtggtgccggatgttagctgttgcccggttatttcggctgatcaacttaagggtctcttccatcataatgcagtcctacacacagttgaactttgtgccagtgaagctgttgcaatcagtcttgttctgccaagagaagtggagggattgcttcaggaatttgccaaggtttttgatgaaccctctggcttgccaccaccaagagcttttgaccactctattcccttgctgcctggagcccaaccagtaaatttgagaccgtatcgttacagtccggcacaaaaggatgagattgaacgacaggttgctgacatgctcaaacaaggagtgatacaacgcagtgccagtcctttctcctctcccgtgttgcttgtgcagaagaaggatggtacttggcgattttgcattgattatagacatcttaatgctatcactgttaagaatcggtaccctctgcctattatagatgagttacttgatgagttggcacgagcttgttggtttacgagtttggatttgcgagccggttatcaccagattcgtatgaagccagaagacgaacataaaaccgctttcaagacacataatggccattacgagttccgggttatgtcttacggattgaccggcgcaccagcaacgtttcaaggtataatgaatacaatctttgagccattcttgcgtaaaggtgtgttagtcttcattgatgacattttgatctatactcggactttggaggaacatgtgcgcttgttaagggctgtatttgatattctctctgccaatcagttgcaagttaagagatctaagtgtgtgtttgctcggtcatctctcacttatttgggacatgtcatcagtgctgaaggggtgtcaaccgatgctaagaacattcaggcagtactgcagtggccggtgccttctaatgtcaaggaggtcagaggatttcttgggttagcggggtattaccgcaaatttgttcgccattttgggattctgagtcgccccctgactaattttctcaagaagaatgttattttccattggactgctgaaactcaagcttcttttgatgccctaaagactgccttgacttcagctccagttctcgcattgccggatttctcaaagacatttgaaattgagacagatgcttcagctgtgggtgttggtgctgtacttatgcaggagggacatcctttggcatttttaagcaaagcgcttggtcctcgcaatcgtggcttgtcgacttatgagaaggaatgcttggcgattctcctagcaattgatcattggcgctcgtatctgcagggtgctgagtttgtgattcgaactgatcaacgtagtctcattcatctcggagatcaaaaattagccacaccttggcagcaaaaagccttaaccaagttgatgggactgcagtatcgtttggtttacaagaaaggtagtgagaacagcgccgctgatgcgttgtcccgacgagtggccgatgattcaacagaagtattgtctctttcagtttgtattccagcttggcttgaggaagttcaaaaggggtatgatcaagatcctcattcttctcagctggtggctcaactgacactcaaatctgacgcattacctcatttttccttggaatctggtattttgcgctataaggggtgagtttggattggtgctaacccgcacgtgcagtctcaaatcttacaatctttacatgttggggcagtgggtggacattcaggggtacaggttacctactcccgtgtcaagcgtttgtttgcttggacagggctcaggaaagcagtaaagacatatgtggccaattgcactgtttgtcaacaagcgaaaacagaacgggttcgctaccctggccttttgcagtcgcttcctgttccggatcatgcatggcaaatggtatccttggattttattgaaggtctgccgacttcctcgggttttgattgcattatggtggtcgttgataagttctctaaatatgcccattttgtgcctttagctcatccattctcagcttttgatgtggcacaagcttatctctctaacatttataagctccatggactgcctcagtctttgatctcagatcatgaccggatctttacaagcactctatggaccactttgtttaaattggcagacactcagctgtgtatgagtacggcctatcatcctcagactgacgggcagactgtacgcgtcaatcagtgtttggaaacattcttgcggtgctttgtgcatgcttgccctaagaaatggtctcaatggttggctcttgcggaattttggtataacacctctctgcactcagctttgggaacttctccttttgaggtattgtatggccatcctcctcggcactttggtattgttgatatcgcagcctgtgcagtgccggatttgcaagaatggttgaaggaatgcactgttattacttcgttgttgcatcaacatctccaccgcgctcgccagcgcatgaaacatcaagcagacaagaagcgtttggagcggcagtttgctgtcggagactgggtgtttatgaaagtgcaacctcatgcgcaatcctcggtggcggtgcgagttaatcagaagttggcctttcgattttttggtccctttcaggtgactgctcgggtgggggcggtggcttatcggttggcgctgcctgcttcttctatgattcacccggtggtgcatgtgtcccaacttcggaaggcatcggaaccagcttcttctacggtagctaccctacctccagcggtggaagaagcagatcctgttccagtgcgagtgctagcacgcagactgatacgtcggggatcagcggctgttgatcaagtcaaggtttgctggtcgggctgtccaacatcggaggcaacctgggaagatctggagcggctcaaggagcgttaccctgctgctccggcttggggacaagccggatgtgaaggaggggaggatgttaccaaccctgtcaagaccaggccgaagagctcaagacagcgacagcccaacactcgtataattgggccagactgggttgcgtaagagagtggctagcatgtgtatataaaggcctagccttatgggaatcggtatcgaaaaacattgtactgaaacctctctataattcaaatcccatcctcctcctaatcctttgttctttatgtcctgaactcttctattcttcctgtctccctctctcgctcttgctcaccaattgttcgacagaaatcccaggaagagttcgtaacacaaatcctaatcacgatacactagcgttatacaattaccacaatctcctactaattcatacagatgaacaaaagaaggccgacgccgtttgccaaactagaattactttagtacgataaagccacatacgcttttgtatactcttgcttttgtatactctttgctcccgtaattttgacaaattgacccgtctataaaacttatttccaaaataagccgcgtcaaaaactaatttcaaaactaggccgacctcagcgttaaccccaatggtgctgagataaaacgtaccagcgccaccctaagagcaagtacaataataggctataagtcagctgcaaacatattttaaggaaataaatgatgagagagaagagcagcgggctacagatttgtagccagctgtagcacggacttcaatacacaatgtgtgtatgacaggtgggaccaggtattaatagtataatatataactattatacgaatgagctattagattggctatagatgaattgaagctagtagttggctatactattaaacttgctctaattggcactaatatcacgttcaacgtggcacggattagccacaaaagaggagctcagcgtcatgtgtgctggcgctgatatttacatggtttaaaagaatgtgtgctggaagtgtcataacgcagaagctagctcagtggtcaggcccctctactccagcccacaggttcacagttcgaaccgggaaagccggttttcaggttttttcttacttcctctttgaatcttgttctattgaaattttttttccaaacaatcacatattttgtttgtagatttatttttatgttactttttaaggggattatttattttattttatgttcaatctggaataaataaatttgaaaacattaattaaaatgttaaatacttagctcaattattataattttgtatttttaattttatgttgtatgatttaggttctcagttcttaccaagaaacgaaccctggaactctggcttgcagccacactgaccaaccgctgagctagatttaacttgtgtcagttattgcccacactaattttaaaccttctaagaggtcagcgctaactcatttggcgcttagcccgtggctaatatgttccacgtcggatatgaccttagcgccaacaatgctggcgcttggacgttttagcttagctcagcgccaaccctaatggcgctaaggtcacggcctagtattgaaattaatttttgacccgacttattttgaaactaagttttatagaagggtcaatttgtcaaaattacggctctttgctctctctacttacagtcagaagttctgccctacaagttgattagcactgtgtttcttatatgcaggagcaagccaacattggtcctctaatttatgagatggcggtggcgcaggcagcatgagcaaatagcgacacgaaaataacggacacaatcacgacaaagtggcacaactgcaaagccgaacagagggaaaatggaaaaagaaagagagaaagaatacaaagcccatgagcccaaatagcgtagagtgctgcggacggcggagtgcggagagcggagagcccttgcgcctccaccaccgcgcctcttgctcggccgtcaactggtggccgcggtgtcgaggtgcggggggcgaaagggaggcctggtccgcctcggcggtcgggctcctcctcttccccggcgcgatcagaaggccggtgcctcccccaagcgcggaggccagcaggccgccactctggttgtctcgtctgttcgaaccgaaattggtgcgctcccttgtcaaacggcaatctccattgttttgcttggtgtgttagtggttgtgtgcataatctaggtttgaattctttttttaagtctaattgtactggtatggttaactccatagtcaaattatcaccattggtaaactaaactgtcttttgcaaagctagagaatttggagccaaagacaatagcatttttgtttgcagcataggtacttactactacttgtggtccggtttgctattgggatagagatggtgatggggtgtggagtgtggactgattctaacccttcacttttttcccttattcctcaatcaaaccataaattagatttcctctatatatatcccaattcctatgaccttatcccaccaaatccaaacaattttacagttcccattatgaatgcagggtttttggacaagtgatgaaataaaaaatttcaaccgtgccatttatactttgtgtaaaggcattcggaacgttctctgagttccaagttctgacttccgacaagctctataatactccgtattaacgatgtcactgctatgtggaaaaaaagatccagcatactacaaactgagttattagtcagatacctattggtgacccttactgagcaagacattggcaatggagtaataaaattattactgaacttgttcactttgccaccgtagcttaaatacaatattacaataccatgtcattccttacaaggatattgatcacaaataattatagtagaatacaactgtcattctatcaactcacatgggctacacatacatgctgcaagtatacaggaagtgaaacatgcaaaaactcttctctggactgaactacgtaacataacacttcgtagaaaatatgtgataactcaacactccatgttacatatatagctagcgtggcaaactgactgaggatgataattcttgctccaaactgtagcaactggagatcccttcatatgataaatcacctgcactggtatagttgttctgtgcttgggatttaccagtatctgggcttaaaaggtgctgaatctctccaccaattcctgggacggggagaaattggaattttcttagcctcttagttctcaggaattgcagcctcatctctacttctttcatagtaggtctatctcctcctctgagttttaaacatgcctctgtaagtgaggcaatatcatcaatgtcttccctgtgagcctcttcaagaacgtgagaatctattatttcgataagagatccctcacggagtctgtcaacgaaataatgagacaaactttgttttgtgcctacatcattgatgaaaatcggtttctttcttgtcaaaagttccaccagaatcactccaaaactatatacatcactcttttcagttagttgtccagtgtgataatactctgggtctaaataaccaaatgtaccttggacaatagtcaccacatgagtctcatcgagtgaaacagatcttgaagcaccaaagtcagagacctttgtagtaaagttgccatccaagagtatattggaagatttcacatctcgatggaaaataggtattgcagcagccgaatgcagataagcaagtgcccctgctgcttctgaagcaatcctaattcgatcatcccatgacaatgaggatttaacactaacatcagtatgaagacgatcgtgcaatgtaccatttggtatgaactcatataccagtaagggcacctcagattcgagacagcaaccaaaaagcttcaccacattgcgatggataatttgagataaaatagcaacctcattgataaactgatctatctcagtttgttccacaatttttgattttttaatggccaccacactctggtcagatagaatccctttataaactgtgccatgtcctccacgaccaagaacacgagtagcatcaaagttgttggttgcctcttctagttcctccaaggaaaatatccttgttttattagtggcgctttcatctgagattagttgttccaagagtaggccctgatttttcttgaagtatgctcttctaattctcttttggatgcttttcttccacttattggctagaataatcgcacctaatgcaataattatggaaccaatgccacaactaataccagttgtaatacctacagccattcattatttttgtgccgtgaagccactttgcattatcttaatgcaataagattgactaatctgtcagctatgacttacctataataagattgtgttgcttagctgatgcaacacactgtcttgtaattggattaaactcctttctgcgggggcaactagtgcatgtaaaatttccaggaagattttgacatgtcccgttgcaatagtttggcagtaagcattcatcaatatctgcaattaacgcttcagttttttttttgtttatattggtacaatataaatgcacaggcactactacctgcttaaaggggaaatgccgtggttaaactatccacataaaatttctataaaattattaaacatttgcaaattggtgggaatgaagaggaacaaaccttcacatccatcttggatatatggattccctcgaaaaccgggaaggcacttgcaacgatatcccatgaatatgttcccatgggtgacgtttaggcaattgctgtggatactgcggcatgcatatgtagcatctttttttactgcggcatcacacgttaaattggctactgcccactttatttctgcaccaccatacacctgggatattatgtcctctcccccatattctgtgtcgttcaacaagttgctaaccaccattgtcccctcttcaattgacacatcagtcacattataacgtgcgtcccgtgggttgaaaagtgtgatgttacctgttgtacaattaagttggaacctttcacttgcgaaacaaccttcttcaagaccaaaagggaagggaattgccatgtttccgcatgatctccgacagtgttctttccgcttggggttgtaatctgctccacagagagagaaaaatgaacgaaaaaccgatacggaagacttttgtttgcgccttagaaagagagaaggaatgaaaattcgatatgcaaataaagctctctatatgtgtgtgccttagtagtatttaagtggagaaaggtagagaggaatcacctcggatgatgcatccttccaaaaggtaaggactttgttctgcataataataataaagatcataattggcgcactcacaggtgtaacctccagatgacatatttaggcagttgctgccggtgctacaagcataactcgtatttttcattcgagcaatttcacaacttggttggtccatgattgcaaactgaactaatgcttcctggatattgcttgtgttcgtccaactcaagaaaagatcagtcgcattatctacataatagtcattgtatgacataaaagccataacaccatggcgcagctgcagctgatatgattgtgctgcagtagcatcaacttggactagtgttgaccgaaatccccgcagatcccttgataacttgatggagcaacatcctttcccgttacaaggcccttctgttggtaccttttcaccatcgcatctactcacgcagtaaccaacagcgtctctcgtaccatactcgaacaaggtgacatcaatattacaaccaataatgtagaaggtgttacgctgagaaatagtaactcccttcctgggagacacccaggatatgttgtaggtatcagtacctggcttcattgtaatgttgaagtgcatgggtgcccaaagatcatcgtcacctacatataagatctgggtggtgccatctttcatatagagcttaggagttttggtgctggtgttgcacttaagctcgaagccttcccggaagcagcccggcccaatcccaaagggataggcgatgtcgtcaacatccccgcagctagaggggcagtgagcgagggaatcattagaagggatagacaagagccctccgccatctccatagactgcagctaatgctcgaggcgtagtagcagccgagcacactagcactaaggaaatggcacaagctgccacaaagctcgacctcatctttgcgccagccgagacttgcctttgtggtgcaggccggtgcctgttaactacacggtcaatttatattcagacgcaccatctctttgtgctcgtccgtggacttcgtaagtaaacgcgagattgacatcaactcccacaagcggtcggttgattagtgctcgatcggcagcaaacaattttcttgcaatttaccaagtctgtgtatttgttgacgctgtatcgacgaagtccaggggcactactcccatcagatatcacgtcgttgctggggccaacgactcacccaactgtcggtctctgctcgactcacccaacgactcaccctattcatccgattttttccacgcgttcagtagctatctaccggctggaaagactggtactgcccgaatgctattttgatcataatacacaaacgtgatacagatgctattgctaccatcttgcttcatattagatgatgaaaataatggccggcgttgcgaaactgactgtactacaactacaagacacgcacatagacttgtggttgtgggaggttgttctgctatcgtacaggttagaattcttgaaagaacgtaacatgtcaagtcgttcaaaactgcagttagcactccgttgcttctacccaacttgccaattcgcccactatattcttacttaaactattcgaaattcttaatatgcaaaacaaggacaagtaatggggtggagtatatccacagataaagaaatatatatgtgattgggatgaaatgagtccaatttaggtgggaacatgttcaaagtctggttcttcgcgtgtatgtatcactcttttagagctgccaaattatttctaagcatacttgtgtatggttactatttcatccaccgatgtggggcgttgattgatccgagtccacgtgtgatcaatgtaacacactgaaatgtactgtaataatcccttcgtcccaaataagttaacctagtacgagatctctttacatggcaataggatatattatatctcgtactgggttaatttattttgaaattgagagtagaaagagattacatagctaagcaagtccacatagatcgaaagcgtgcacctcaaccagctagaatgacaggagaaaaatttttagctgaaaatcttccgaagcttttcattaactttcagtttggacttgaagggcatgactacggcatgccatgtatgaccaggtatatgtgctttgtgctcatgctaagataatatgtgccttgtgccttgtgcagttgtgttcatgctaagataatacttcctccatccaaaaatgttatataacctaggattagatggagacggaggtagtacagtacttgcaagcaattaaccagaacgttcttcggcgatgactacagctgacagcttctccgtatgtgacattattcatctcccggacaaccggggcacccaacgagtcaatttcgatgtgaaccgggtcgtgcgtgtagactggagcaaccctgactttagtcaattccacacctctcgctgtactggaatctactccctccattcgaccaaaaatagatacctctgtagggtatcatatgcctgtttagttctctcgtatacgaacacgtatttaaagtattaaacgtagactaataataaaacaaattacagattctgcctgtaaactgcgagacgaatctattaagcctaattaattcgttattagcaaatgtttaattaggctcaaaaattcatctcgcaatttacatacaaactgtgcaattggttttttttcttccacatttaatgctccatgcatgtgtccaaacattttatgttacggaaaagttagaagtttgaaggaaactaaacacagccgtagctatgttgatgggcttgtagtaaatctgattaccaacagcataaacagtcctgtaataacgaatcacaaagtgtacaactagtctgtaatataaatcgtttgagagtgacgatatgcacaaatcaactaacactagagagcctagcgcatctgtctatagcagaaatgtactcattgggttagcaaagtaacgcttgttacacttggatggttctttacagcgatcttgcttcaaaatactctgcaaaagggtaggtgccgaaggggcacgttcatcaaacacccgagcataaaggtgtttatcaaacatcagcttttccaacaaggtccggcaggtctgcagaaaggagaaaacaaaccatgagtggaataatgtaaaatatttattttttttaagaagggtatttttcccagcctctacatccaaccggatatatacagcctttttgaattcgctcaaataacccaatctgagaatttcggccctcaaataacccaatctgaaatttgctactatggatatttgaactcaagactgtctttttaaattaggtacttaacctatcaaataggaaacttagccatcaaataacccaatctgaaattcgctcatatggaaaattgaactcaggaccttgaggtgctactcaggtcactgcaaccactaggctacatgccttttcacaaatatttattatttaaaccactatcattttaatatcgaatatacaggtacaaaaggagaaagtagaggggtgacgcacctgcgggttcaacacatccatccgatggatgatatcctcctggcataattagagcagaacaatagatcagaacttttaaaatattgttgctgataatggtaactccgtaactggaatcaccactaagtaggggaatcaaacgatcttagatctgtacattcaaaataactgcctgatcaatttaagacaaaccaactttaccacgcaaccggagggattcaaataacttgaacagtaagagatgagaaagtaagtaaaaagaagaatataaatgatatagaggaagcaaacacgggagtcacattcagaaagaaaacaggacatgctaaaccataacatacacaaacggaaatttccacaacacttaaatttagacaatagttgaattttccattgttcacttgtaccgtatcgatgaatcttttaatattgtagtgctagctataactaagatttaagtattccattcagatatttagaaataaaactaaaattacaattgtcaaactaccaaaataacacgaatttgaaaagaaaaggaatattttaaaatatggaatttcatgtctcaaccttgattttgaattcttgaatttccaaaccaaaaataagggatccggggaatttaaaattcagatttatgcttgaaaagttaagacttccaaagtttcaaatactgaagttctcgcataaaattttctttttaaaatgagacatttaaagaaaacaaggattaattagtaaagaatgccatataacattaatgcaaaacttttggagatatagatggataaacaaatcacaatttcagtggcatacatgaaactttcctaattcaaaacaaagagctacaaaaaataaaacaaacacgcacctccactactcctggatattgcatggtatatccaataatacgacgacttagaccttcgtagacagtgttattcatgcttccatcaccatttatccatggcaatattgggtgatatatatgcctttcgcaagcatgacaacaatcactgcccctgttgtcttgtgctggagtaaacgaccttttctgacctacaggactttgatagcgtatctgaggagagcttgacttgctttggacattaagaaccgtcacagtgtgcccgtcaccaagcatttttacactcccttgcacatcactagacattgcatgcttctctctcagtagattttctgtatctccagtctcggccatctcaaaagcagaagctcgcaaacaactgcaatgacttgaatctgcaagtgtagttatatgatattttgacttatgtatagagtcaacaatctgcacaccatcatatgcattgacctgtgaagcaagaaaatagagtgacacctatatatgagtagggaaataaaaaaatgtggacaagaaagcagcagtaagtgtagcatcttatatgcaagtattccactcttaatcagtttgacataaatatttaactatcccaatgatgttttaaatgtttatataaaattctacaagtgcagaaaaatatgtcagtaataacaagatctgtttgttaacaacaaaaaaccactggtaaattttgacaagcaaaagaatgaacagtgcaagtattcataattaggcagatatgaaaaacaaaagtgaattaagataattatatcgataaaccagtaaccaaatagaacaaataagtaggctactaatctaccatatgcatgcttgctcacagatttaccttaatgaccagctgaaatctcttgagagtatgaacaatcagatcgacaaactggatgcctgcaggggataagaatataaaaatgaactatacttacaaaataattgatgcatagtctaacaattctaagtttaacataagttacacaaatctaaagaatacctagaggatccagtgcctgtgacatctctctcaaattaactccttgttcgccagctttatgaacaacacaaaatgcatttctgaacaggtcagaagacaatatgtctggttcatttttgttacaacataatgatggtgactgttcagcatatgtttttatagcatcccaaggccacccactgtaagagttctccaaatgagattctgacagtaaacgccgacatgaactggagttgtttagatacaatgatgacatattgtggctttctacctgtgaatcaacatccttgctccccatttcccaggctgaagtaaaaataaggcattctttatcatgtaactcttgtgtaagattacttgttttaattctctcttgattcaaagccacttgaagaccagggaaacctttctctcggcgatagcaaaagtcgctttctatcttgggcaaaggtttgtgtttcttagtcttactgcttttaagtttaaccatatcagccttgcgtttgtgactactctcatccaattcactgttatcatcaacaaacaaactagagctattaggctcatcagcctcaccaactccttcacttggcaatgagggtgaaatgaacgactctccagacaaaacaagagaaaagagctggacaatttccccacattgtagatctggatacaaacaaactccatcatccatggtattcttttgctgccctacccattgagaaaattcagaagcttttttccctgaaccaaatgggaagggtgaattcgaagcattaaaaaagaatttcccagaaagagtgtatggctttgttccatctccagttacctgtaaaataggaggaaagtagatgaacagttgaaaaatgctgccttaaattgcaagcacactttaaaaaaaaaacataaagcttaactatactgactaagtaccaaaaattgagcatataatatcattccctttgtcttagagaggtacaatatcattcctaatagggttcaatgtatatatgccactaaggccaaatgattcttcctaatatcagcacaaacagaatgacagtagagatgccaaataaccacttcaacctttgcagcatttaaatgtaagagattatcaccatagctccactgcaaactcagatgcttgtactacaggacaagtaaaagctgaaaaatttatactccctccgtttcacaatgtaagactttctagcattgtacacatacatatagatgttaatgaatctaaacacatgcatatgtctagattcattaacatctaaatgaatgtgggcaatgctagaaagtcttacattgtgaaacggaggaagtattacacaacaagcatagattatagatatgtgtagttgcgagctccgagaactgcacaaagaaatccgcgatgcaggaatgcagcctcatcgcatttatacttcttgggttcacagccaaagaaatggagcagtgcacataggatcttaaaattcacagaatgttgttaatacatctattattctattgtgttttccaacaaatacagattcaaaagcctgaactggggagagcatactgaagaaataatcaaaagaaatttgatacattgatgggaagatgaattagcaaacactaaccatgaaatttttctctctgagaaaggaaaaggcagtaaaaatttcagtctctgaataaagctggagggttgctgctaacgaagcttgcacttctggtcctgatgaggtgctgagaaaagccagcttcagaagctctaatgcatttgcaactgccaatgatctgcatacatctcttttagcaatatcatctttattatggttaatggccttttcatgagatctgaagggaatgtccatgtttttacttgcatggattgcatttgacagcctataggattttgcatgttcacggagtccactttcttgaattgcagtgcttgcacaggttgcacgtgcacctaaaacctgattattacaaggtaaaacatcagcgttaaataaaatatgtgtttattgagattaaatgtatcagtacgtactggctgtttctgcccatttggaacttccttggtggcatcattatcatcattgttcctttcattcttagacccaactctcttggtctgctccattttttctactcgaatgaattcaaggacttcatcaagtgcactctttatctctggatcctcgaaattatcccaaaagaattgctcagaatctggatccacacagttgtcatgactagaatttgagatttcggaaggtaatcctctcaatttccatctcttttccttttcaaggtacctagcgtatcgtatccctaaaaggtcacagactcggctcacagctggtcttatgtttgtttttttcctcaagtatgctatccttctacggcatgcagctggtggagctggaagatcagaaagagagttccaatctacgcgatgagatactgctccaagtgttgcacgggatctagtgtatatcatcagcaattttctgtagataaaaataaccaatcaggttcccagcatcatggaaaacattgtctccagtaaagtgcattgaaacaaaataattgatgtacaaccaagaaatacctgtcagaatcgtatgtccacacaaatcgtttctctctcatgcagcttcctcttaagatggtagatcgactgatccttggactgcttatcgtatcttcatccacctgtgggagagaatcagtatggaatgtggatggagagattctctcagatacctcctcatgtgggatagactgtgctggtctcggttcagtggattcaatggtttcaacattccgtttgataaatttcagggtaatctcatcagcagaccttttcctttttttagaggttgatcctgaattaacttttcgccgttttcttgcagcagggacggtgggctgtccatgaagctgtctattctgagaggacgatacacagagcacctacataaatcagtccatccagtcagtgttactggatagaaaccatgtacataacagaaacataaagggccccgaacataaaaacagagttgaaacgatagcaagagtaaacaaaatcagccataacaatgttgcaactaagatgatgaaaataaggctaacattgcaactagatatgagatactattattatgtttcttggctatattgtatttatcactttgtttcctgctatatagtgtttaagcattatttcccttaagagctgccagtggagcttgtgcattcttccaaactttgtaaatattcctcacaatataatccaaatagcgtatgagactctgttactgctccccagtccaaaaagaaaaacgagtccagttattactattttaactggtccccataggcccagatgctatcgcataaaattattgtcgatcaattcaactcagaatagtatgagtacacctcatctatttgagatttcacgaatttgctaccagttagtcgattacatgtcacctttcccacacatgttctcggtcacatgtccactttacaacatgagttggaattcacaatacagcctatttgccaccttgattcaccacattcaagaaaaagaaagtaggcattaggacaacctcacgaacacactttgcatggtatttgctgatacattaaacattcccatcttgtcttgaaattccgttgatctgtttctggttttgtgtttaccctttacccttattttaattttaatactttgcatgggatataattaatctgttatagggttatctttccacaatatagaactgaaccagaaaaagaataggggtgcattagttggtatataagttgaagaaatatcaaatacagaagtaaggtcaaatactaattcctataatgagtgtttttatttcagtcccctccattattttaaaaaaaaaggtcaaataataaaacagagtagctcttcgtatctctaaggagcttggagggaaatatcgagatcagacacatacctgctgtacagagagattcaactccctggcaattatacgacaatctctaaaaggaagttttccattctcactggcattcataatgcgctgttgtaactccagtctttgttcagtagtcattactctaagtgaactccatgaacgaggatgagaaacctacaaaatatagggtatcatatagttaatctgtacaacagtacaagagaaaatcacaactgagatcgaatggtctaacattagcaaaatagccaatgccagtcaatattatttacactgggtgtaatgggcttcaataataactaaatggatattgaaacacatttacaactagtagcatgattgcagttgacaatatacagttaaaaacaaaatagaaacaagaaaacggtcacatatcaacatcaggattcaacaacggtgagctctttgcacatggtgttgcagtgttcaatcatgaatagtaatttaacagtaatggtagatcagatgccctgaaaatacaaataatatggatacaggccagcattggccattcaaaatagaacttcaccttttaaaataataggcagagtcattttttactacaaccagaaaagagagaagatatatccataaagtgcagagttatgtaaataaaggaactaaggttagcataaaacatacaggagagagagagagagagagagagaactaagaaagtatacataaacacattttattggagaggtgaataatgggataaaaaacgaaaatgaccattaaaaatagaacagataaatcaacagtaataagtcattattattaggtaacaatgcaataatgaatgttgacaatgacaaacctctggtacagaacagccaggaaaggcacttgatggctcagccaagccagctgttaaataacagtactctaacgtttcccagtaagcatcaacaaactcctgccttgaaagaacaaaatcatgccgaatttttggccgatggttcacattaacatgggatgatggaagaattcttggtgtaggctcttcaatgtaaggcctcagctctattgaatgtgtaggcaaagcatctgatggcgcaccagaatcatctacaagttcctttgcaagttggacaagctagcaaacaaaacgaaagaactaatcatttcaattcttctcaagctgaattacaataaacattaaccggaattcataagacagatatgcagcaggccaatatagacctaaaaaatgttaaagagcatgcctaaggttcaagactctcacaacgttaattccaacatcacagacaaaacattaccttgagcttatctagaatatttaccaagcgtgagagtcggcctttggcatgagtatccatgagttggttgtattcctcggtaggaatttctgaaagcgtttttccaagcctacacttagtaatcatgtgatcaatcttctttgctgatcccacaacttgcagaaagagttcaagaggcattttttttgtagctcccaccatagaaaacaacacagacgattgactaaggttcttgtcatgatgcccttctttgtcattatcaaatgggtcacaccaatttggcaaaccactaacatatacccacagaaatttatggaacagcttagctcgaatcatctttgcaccaatgaatccattggcatgcatagcttctaatattaatggtttgttatctttaactctgcgcggaatcctcaatccaagtatagcagtcgtgtgttgattttgcttcaatttagctgctgcacctgaacgagtttctgtatcaaagttcctttgtctattcctaatttgatccacaagttccggtgacaagtctccaacagaagaatgcagtattacatcaatgagacgactgcgggtgtagtctgtaaccagagggacactaactttgatgcatttacagctgccctcttcctgaagcttatttaaagtgcgagtcaatgtcttcctatccattatttttccattttctttttcaagtccctctaaccatttatgtaactccacctttagtacaaatttctttttctgcaaagggaaaaaggaaaggtgttatataacaatatgcagtcctacatgcaaggatgcacttacaccatgcatgcacatgataatgaaataaggtattttggcacattattcatattaaaaacttttgagtgttgtatactcaattagtaacctttagcatgtgaagaatcctcctatgccgtcgatcatcagaagtcaatggagggcagcgacgcctcttcctctgacccaaagcaagtttctctaaaacagaaataaggggctcactttggttaagctcattgattttaatggtgctcatatatgtcaacattcaaactttgtaattcttttttcaacatttaattacaactatgtaggttcacttgcaatgcagcataaaagttgtatcacagattcagttcaaaagtactttcatatgatcgccttttgtggtgataagaaatcctaaaagaaatttatggtcaaagttcaacttggatatcgtgctaactcaaagaattccttaagaaaaagaaacacagggagcacagatgacaagtacaaataactcgcagaactcaaagttagttcgcaagaagcttggcacatacagttctcaaaaaatgcactgtactaactggatgaaatataaatcactaactcagccgtataaatctctcaaactgtcagaacttgcctttacttttgatctttggaatactcgataaaaaaaaaggtgcagggtatgaaatagattacatacctggttatgagcctatgagcttattaaacagagcatatgactgcacatttacttggacgaaaatgtgaagccatttggatatatgcgactaagggtgttcaaaagtaaggtcaataagtgaagttttaagcagcataaaataccacaagctcctacaacagcatggcactcccccaaagaggtactaagcacaattttttgaaagaataaatagaaactaccaggaacatagatcactgtaccttgttcaacaatttgagaaaccccaacgcaagcttcatggttactctggaggggatgtcctgctggtttattgtggcattcttcttccaacaaaagcttgttattatcaacaaataaatcaacccgtgagattggagattctgatcctttagatggaactaatgaccacaaatcagaacacttctcgtggtcatctgggagtgcctccaaattatgcagagcagcaccagctttgtagtgtgaaaagttttttgaagtccaaactcggtattgtgatgtcttgtcttgaacttcagcttcccaagtcaaattgtattttttaagcatggatgacactcgcttatgaagcctttttgaattgttgtgcccaagacgtttgccaagctacatggaagttacatgaaaacatgagttgctaacttcaagaaatacagaacactaacatgctgcactaataaggtatcatgctttgcaacaagatattgcattaggatgggctattggatgctttataggcccatatggctgggaatgggctgggggtggggtgactgggaaaaggctgggcgttgggacagagtaaaaagcacatgattttctggtttcctcaagaggggcacgcagcgcacaacatgggggaaggggaggacagatgactgtgcttttaagtagtaagagactagatgacactgacaatattagtccatatcacactgacaatagcatgtgcattgccatggaactcaaataagtaaacgacagcttctaacctaagctttaaaaatgcaaaagcaattatatttaaatccagataaacaagttgatcatagtagagagataatgacactttactgcactatataatcatcaatgctagtctcatcatgacaggacattttgcacatgaagctctttttttttcattagggatttcaaccagaagaataatgtatcagaaaagattttatatcataaagaagctccagtaagttagtcaaaaatatagatatgttataggccatgctgctagagacaaaatttatgtatttacgctactagaaatgaaccagttacaacccacaagaagccgtacatatatgccattaagacaactattcatattcctgtataccaaaagaatagtttgtaggtttgtagaatatgtcattgaaaagcacagatgtataatttaactcctgaaaaagttacaagaagtacctcaacaagggttattccttttggcccttgagcgttgatcatatcgtatatacagttctctaatggaagctccatgacttgatcagttgcctggcctttcttgccaagtttgtagtttgaggttgtactttttggctgaaattcatttggatcgaatttcttcaacagacgtaaacagcgaataaactgaacaaaaggaatacctttatcacttgttggctcacaaagtatatgaccaggtgaaagataacagcacaagaggggtacatatggacatggtaaattataaagtcttttctaatttccagttcctgacaggaagcactgacaagcccaaaactattactgaatagagcatacattattaattgaaaatgccaacagaacaggaggaaagattaatgtcaccttatcatcaactttggcatcaaattcttcaataagttgtgcgtctcttagcctatgcagtacctaagcaaacagtgtctcagtaataccctataaggaggaaaaccagaagagcagaaactagagagcatatgcagtaagtgattctgagcaaacttacatttctccatgctctgtgcccatatgtcatcctgtaattgagatctacttttatatccgaaacaacaagagtctatcgatgaaataatagcagagagttagaaaactatagagaaaaaataaaatccaggagaataccaaatggaaaagaaaagaaggaacagttgacctttccactagcttcttctagtttatcgcatatggctttcattgctggaagataatcatgaatagatatatcatttttgtcatttacaccaaaagccccatcttcttgcaaaacatctccattgctctcttcattgctgcccagtagttcaggctttatgatctcaattctctgttgtgaattcatattcaggtttttggcatatcgcgagagatacaatgagttagtattgatgatttgtttattctgggaagcatcttcggcatcagctccatgatctttaacctttataatagttgactgcctaacgattaacttctgcgactgaaggctctttacaataaagtggaagttgtttcctttcatacggaaagttttgcatagatcattttgcgttacaccagaagtcctatgagaaacaaaggaaaataacatcacagtgcaaatattcaaaatcaatcatcttctctgcctatatatacattacggaacaatgtatatatggctaacagaaagataatgctattctatttgaccatgcttcttatgtaatttgcaaatgcatgctaattgctaatgatcagaatatatgcaggttcctgcattaaactcacgaaataataaaggtaagaccaaaatacatctaaggaaatggtgtttataactatgccaaattgtgagtaaccccacccaattttggtttgccaagacaatcatgcatagtagctcagcatttgggaaaaaacctcccagttcatagaaccaccagctcatatgatgatttgctcaacggttacgccagaacgcacctgcttgctccgacccgttcaagcgcccccttctggacggcgctcaactccgatttcgcgaacctgcggtcatacatcccgaggaagttgtccctgagcgcggcgctagcgaccaaccgcaccccccgccgctcggcctcctccacgtccttctccaccgggtcgacgggcgccccgtccccctctcccacaacgaggctgatgatggggagcgcgatgaggcgggcccagaggacgcgcttggcatcgaggccgggagagaggccggccgcctcgagcgcgccgcggagcgccggccagaggtcggtgaccgggaggccgggcgagaggcgggcgcacacctcctccagcgccgccgagacgagcgcgtccatgcccccgcggctcgtgtagggtggtgcgccccggtgtttcgggaggtttagggttttggctacggtcgcatctgcctctgcgctcgaggagggctctgtggtcggaggaagaggaggattactcgccacgcgaagcggagctcgccgcgcttgccggcggtgtggccgcggtggggagtagtggatcgccggctttggtccggtgatgaggcttgccgatgatacagaaagagtacgggttagattgcacggcccaataggcccattaacgttagaaatgctcggctcaataggcccagtaatggccgctccctagtccacaaaacctagtgacgcggcgaaacccaaaaacccttctgcactcgccgccgcctccgcaacgaaaatggcagcgctcgcctccctcctcctactccgccgccgcggcgggagccacgccgccgacgctctcctccgcgcgctcactaccgccgctggagagcagccactcacggcgtcggcggccaagacccgcctccgccgggagcacgaccccgaccgcgtcgtctccctcttcgaggccatcgacgacgcctccctctcggcctcctccacccgccacgcgctctccctcgccgcacgcaggctctcccgctcccgccgcttcgccgacgccgaggccctcctctcctcccacatcccggcctcccccaccgagccgcagctcgccgctgtcctctgctcctacgccgccgcgtccctccccgagaaggctctcgccgccttccgctccgccgcgccgtccctcccgtccccgatctccccgctccccttcaacgccgtcctctccgtgttcctccggtgccgccgccaccgccgcgtcccggtcctcttcgacgagctctccaaggagttctccatcacacctgacgcctcctcctacggcatcctggtcaaggcatactgcatgctgagcaaagacgccaaggcacacgaggtgttagatcaaatgcgtgggcagggtttcacgccgaccaatagtatctacaccacaatgatcgattccatgtataagcagaagaagatggagcaggcagagcgcttgtggaagcagatgttggagagcggacgcaagcctgaccaagctgtatataatacaaagatcatgcaccatagccttcacggcaagacggaagatgtgcttgaggtgatagcagaaatggaggaagctggagtgaagccggataccatcacttacaatttcctcatgactagctactgcaagcatggtaagatggagactgccaaggagctgtacagatcactaggcgagaaggggtgctcagcaaacgctgccacgtacaagcatatgatggcacagctgtgtgcccatggagatttggacggtgcattggtgatcttcaaggaaagctataggagcaacaaggtgccagattttaggacaatgagtggattggttgagggattgacaaaggctggcagggtggctgaggcaaagaatattgttgccaagatgaagaagaagttcccagagcaattgctgtcagggtggatgaaactcgagaaggagcttgggttgaactcagatagcggagatgcaggtactcgggcagaatgtatatctgaagaaactccttctgaggccgaggctgctatgccaaagacacttgagctggaagatccttcttctgatgaaacagaatgtatggcagaggcgtccactagtgaggaaatgccacgggattctgcttaatcagatgttatttatgtatttcaagtttaatttggttaggatgtttttacattgtgcattctctacaaaggaagaatttctaatgctcccaagtacagaggtaaacattagtttctagatgtggactcctgagccactaagagttatattgggctgacaatgcttataatttcgttgttatggatttattgtggtgttcaccttcagtaataattgttacaataatgtgatggctgatctatttggcgtggaagtgaatttcacaatgaaacacatcactgccggaagttcagctatcctggagctttcgtcatgttctgtactaactgttacaaacttacagtaagttgatgcctggattattcggcattgaagtgaatttcacaaggaaacacatcactgcctaaacttcagctatcctggagttctcatttcagttcctgctttggtttttttgagcaatagttcctggttgattccatgcatgcctatgcaagtaaagcattgaaagaaaatatgctgctggtgatgcttgtggtttcggaggttgtgctgctgtcatattgtttatcctatttcccaatacatcccactgaaattgctcataaatcatgttgacgaggttgtaatcttgtatgagtataacccttgtttgcagatttcagacgaaggtttgcagtgcatcagcaacaaggaagacatggcaaaaggccaaaagcaatgaaacaagttgccggtgccacctccatgctgcgggaacactcgttgatccccggtgattgatcgaaacattactgttgcattgcaagtctgaactctgaagtcactgaaatttcactttgtcatttcctggcaaccttcatcccagtatcaactatccacaggctgctgctatttggttgagacttgagactggggttttgtgaaatactacaacaagaaagcatggaggaattaagtgcaactaagatgcgtctcacccgtttgggagtagtatattttggaacggagggagtagtgtttaggatgtatacaaacattatgaaacggcacaccataatgcatacatacatcctatatgaagctcatggtgaccctcggtttgcggggatcatcgtccccaggatccgctagactagctggccgcagtttgcacaaaacgagaagctaagtaggagtaatcccctttcggcgatgcttgggagagctcacagtttcctgcataaatgcagcacgcaagttgaaactaactttacctctattccgtgaaagacataaacagtgttgcaagtcgcaaccccggttcatgaaatgtgcatggtgctgggatcctgttgataacgggattttggactatttgccatcttccccaatgccacactcctaaatgccatcttcccaaaaaacttgaataaattgccattggtccccctacattagttgattttctaccattttggtccattcttgacgccacatcagcagccacctcatgacaccatcaagaaaatgacattaatacccctgccctttcagtccaaatttaacatagtccacggcaaataatacacaaccaacataactaatagatgcacaataatttcacaagcaaacacagcttggaacatacagacaaaacctgcaaacgctagacagaccaatctaaaaaaagaatatcaggaaaaaatttgatgccaaaccaaagagagggaaagatgaaggatctattgttcttttacctgggattgtgtcatcgtttggccactgccggcggaatcgatgaagcaaggagcgatgcgaagtcgaacgaggagtagagacgcaaatcctggggcaggaagcgatgcaaatattggagtttttctcctactcccagtgcaaagggcaaaatagggatttcgccccatccaaagctgacgtggcatcaaaaagaaataaaatggctaggaatcaactaatatatggatccagtggcaatttatctaaactttttgggaagatggcatttgggagtgttgcattggggaagatggcaaatagtcaaaaatcccgttgataacacagtgcaatcagacactctcacatcgcaggtttctcttaatactgaactctactagcagagggccacatcttttaacctacaacatgtatgctaatgctaaaatttaaattttaaaatttaattttggagttaactttgatactttcatcgtagtttttttaacattgacgtcatcaagaccacatgtatgaaaatttcaaccctaaattacatttttatcgctaatatgttgtttggagtattatcagcaatcggtcaaccgatggcagccaaaattttcgctgaatcctgcactctactagagtactggtaactctgcactctactaaacttgccctgtctctctagagccagcaagagagaacaaatttccttctacaaacagggtttctagatagagagaacagacatactagtattacttccatgtaaaacggttgttcctatgacaggtatcggtctttcagatctgccatgaacggttgctttcagcagatcagatgcgtgaaagcaaccaagatccgtgtggaacggaggatgcatgcgcctcagcatgacacgatacttctacactattcatggtttagtgcttgagacgtatcgcttcagctgattcagacgtcccgtttcctgtagtacaaattgtccaccattataatactactaccatagtccacagcatatgctgtcatggggatatgcggtcatggattcctaacttgagtttaacatgaaaggtccatttaaaatagcataatgacaacttctcgataaactagagttagaccaccgttttgttgccgtcattcttatctgagattaagcagatgttgtcagcacgccaataacataattgagacagtgggtttcttttgtagcaacctctgtaaaaaggctccatatttcatttgttgatgtgagtcatgtttgtccactatcccgtgatgctggtacaaattctgtgcacatgttaaacctgaaatttatgcttccaagtttcaacgtcgcagaggctgaagaaccaagtttgtcctaaaggaaattcagttctctcagaaacaagggaatttcaacgtcgcagccccgttcgtttctactaaaaacagtggatgaaattttaaatattcgtggcacgctttttaaactactaaacggtgcgtttcatgcgaaaacttattatataaaagttcctctaaaatatcagattaatatattttccaagtttgtaataatgaaaattcaattaatcacacgttattatcatctcattttacgaggaacacttgatttttatctttatctttatcttcaaaagattcaaatactaaatctagctaaacaaagcgaatccttagcaaaagaatcttcttttaagccagcgtggccggcaatttatcatgcattagccatccactcatccatagtactactgatacagcagtattctgtcactcttcgtgagagatcacgatcatggacagcgtagcgttagcaccccgtgcctaactaggatccaaccgctgctgcttgatcgcattcacatgccaagctagccgctactaaacgatccaataaaacggagaattcaagagcgaaacacctcactcgtgatggacacgggctactcatatataaataatttgtaatatgttctaattcagctaaataaattaaattttatttttctttcgccgactaccaatgtatcatgcctctgtcaatactccaataccggagattattgttgtgttcgttcgtactgaagatgaaaatgaaggaaaaaaactattaccatataattaattgagttttaattattataagtttgtaaaaagatttacctaatatttttaagctttatctatatacaaagttcttgtacgaaatacatcgtttagcagtttaaaatgtgctaatggaaacaacataaaagatatactccctacatttcaggttacaagatgttttgactttggtcaaagtcaaactactttaagtttaactaaatttatagacaaatatagtaatatttacgttaccaaattagatttattaaattaataattaaatatatttttataataaatttatcttgggtcgaaaatattactatttttttctataaacttagctaaacttaaagcagtttaactttgatgaaagttaaaatatcttataacctgaattataatatctcaagcagcgatcaatgattcgatggcaattgcgtggcaaagaaactgagaaatcacacaaagttgtggtcactcacgcttggtgctagtgctagctgcggaatggggcagcagaaatgcgacgagctagctggatagcggcgcctgccaagagctagcgcgtggtggtccatgccaagtgatcgatacagcgagccacgcgcgccgaaactcggaaaaaggcggagagatatcacgagcttcgtttcgcgcggcaatccaccatgccacctcgcctcgcacaagcgatctcgctaagagaagtacaataacacaacgtactgtaaactagctataaacagataaaagaagagagagaaaagcagcgggctacatatctgtagccagctgcagcacgatctctaagacgtaatgtgtgtatgataaataggactagatattaatagtataggaatcaattattatatgaattagctagtattatattagcaatagatgatttatagctactagttggctatttgctctaataatcctcggcgagaaaatgacgtggtttttatataattgtttcgagcccaatcacacaacgatggagacctgggagcaataagagggagaaagactgccacttgatagacggaaacaaaaatccatgtaatgcaatttgctagtaccatcgcctcatcagagcaacttatccgtaacgagggatcatcatttttttaaaaaggacaagttgctaagcacgaccgatcgattctgattgggttaagattccgtttctgtccatatcagtgaatcatctaaaaacaactttgaaatactcttttgaaaatgtaatcccaataaattcatccagtacaactcctgccgttacggtttggtcaacagttcaaaaccgcacaccggatcctgctcctgcgccgttcgatctcatctcgacggataccagcagctttggcggtggggaccccacggctcagtagcagcacaccgcgtccgactgatcccgagccgtccgatcccatctcgacggctaccaaagaaggtgacggaggtgggccccacgggtcagtgtcacagcacccggtttctctgacacccgcacggaagtggggcccagccaaagcccccacaataaatttcgcacagcgcacaggcctctcccatcacccagcaaatttttttctcgcccaccatttcgaacgaaaaaaaatcaatcaccaaccgggaggccgaagcagccaacccaatggcgcagcacaccgccgcggcggcgggcggggacgaggaggtggcggaggctgaggcggcggcggcggcggcggcggggagcacgctccggcaccgccacgcgggcaagggcgcggaagagcacgaggcggcgggcggaggcggcggcgggcgcaatggcggcgccgacgacccggacgcgacgtcggtggagcgggtgttcgcggacaaggcggtgccgtcgtggagggagcagctgacgctgcgggcgttcgtggtgagcgcgctgctcgccgtcatgttcagcgtgatcgtcatgaagctgaacctcaccacggggatcatcccgtcgctcaacgtctccgcgggcttgcttggcttcttcttcgtccgcctctggacctccgccgtcgagcggattggcctcctcaagcagccgttcacgcgccaggagaacaccgtcatccagacctgcgtcgtctccgcctacggcatcgccttcagcggtaaacgtcttcgacgctttcggctttactctgacttctactgcaccacctttgttggattgggactcctcgttgcagcgagtgtactgtgtgtgcttatgtctacctccgaattgaatggagcgagtattagaggaatccatttggttagtgcgtcagcgtgttacaacgttactcttactggtggttgcgattttgggttgtggttatgtgggagtatgatgcagcagatctgatctggatgtgggagagtcgctggggaagtgtagcatttcgcggtagtgggtagctgggagacatcacggaatcggttgttcttgtgcccctgaagaaaaaaacaacaactactacaacatcggtctcaaaagcggtttctgataagagaactgtactggaaaacttgaagaattgtcattcttggattcggacttgtcaacttgatgctgctttgtcgcagttgagtggactctgctgtttctaccttttctgatttcacgaaacagctgcttgacttcagtgcacctgatttgaattgtgtagcaacgggacgaatctttagaagattttggttttggaagttggtttattaggtgagctaagttgtggatatagatagtcaacactatatttttccctgtgctggtaagaaaatcgctgcattgctctcatttgatgggaaaagccatttgcgtttaggatgcgacgtttgcaggagtaaggacaagctgaagtggaccagcttgcttggtttgactcctcaccttaaaataaatgcatggcgcatgcttcttctttttttctttgcttaggcagacatgacacatgcatgtgaaagcatttggatcggcataaacaattataatggtctgcaggattatttgagaaccatgctacgtggtacactgatgatcattcgaataatttcatgtggcaaggcatgatgtttacttgcagatgcctagtatatgaggaatttcgtaaggatgtcccatgtgcatcagatggatataagttattcttaacaccagaattaagtttgtttactgttttctattccaaaacagcaaagaaaatcaagtaagtgtttccaagaaagtggtgaaccaatgattaactagttatctactatgtttttaagtggtaataatatgtcaatgcaccatgcatgagatagttgcttgattccttgcctcatttgcccaaagcatctcatattttcttttgatgtctgtttacctttatgaaactgtatcccttgctagaatgtcataatgtatgaacaaaaatttgtgccaattgacatatttttgtacctgtttattccaaattccaatgatcaggtgggtttggcagttatttatttggaatgagtgaaacaatagccaagcaagcaacagaggctaaagatgctcaaaatatcaaggatcctcaccttggatggatgattggttttcttttccttgtcagttttattgggctatttgcacttgtgcccctaagaaaagtatgccttaaacctgttaccttctagttttactgaattgctgtatatagggaaaacttatccatcctaacttaattgttgtttcagattatgattgttgattacaagctcacctatccaagtggcacagcaactgcttatctcatcaatggttttcacacaccagagggtgccaaactagcaaagtatatctataaaatgctactttcatgagtgccaattattagcccagtatatccgtaaatgttatgcaattcaactgacaaataaccatctttttcaggaaacaagtaaagacattgggcaagtactttctgtttagcttcttctggggttttttccagtggttctacactgctggtgatgactgtggattcaagaacttcccaacattgggccttgaagcttacaacaacaggtcagaactcagaagtatagcataacattggttttaacaacagtgttgactatgatgtccgttgcctcagcttaacctatagctaatatctggtgaaacactacctctgtcgtctttggctgtggtaaaaactgtagttactaatgtctagtgtctgaccatctggataatagttaattcttagttccaagccattggtctcccatatttgacttgacctgttacctttcaggtttttctttgatttctctcctacatatgttggagttggcatgatctgcccatatatcgtgaatgtgtcggttcttcttggcggtatcctctcatggggtgtgatgtggcctctcattgccaagaagaaaggaagttggtaccctgctgatatctcagacaacagtctccatgggctgcaggcttacagggttagcatccacctttccgctgattcccctttatgaagctaaatcatacaatacagaattcaaaaggctagagagcgctttgagtaatgttttaactgtaagttcattacctttgcaggttttcatatccattgctttgatccttggggatggtttatacaacttcctcaaggtgcttatccgcacaattgcaggctttatatcaatggttcagaacaattcaaaaggcatgcttcctgtttcagacaatggcatgtccatgtccactgctgaagaggtatccttcgatgatgagcgtcgcactgaaatcttcctgaaagatcaaattcctaagtcagttgcatatggaggctacgtcgtagttgctgctctatcgattggcacccttcctgagatcttcccgcagctcaagtggtactacattttggttgcctacatcgttgcacctgtgctggccttctgcaatgcctacggaagtggtctcactgattggtctcttgcctccacctatggcaagcttgctatcttcgtgttcggagcgtgggcgggcctttctcacggtggtgtgctcgtaggacttgccgcttgcggtgtcatgatgagcatcgtgtcgactgcctctgacctgatgcaagacttcaagactggatacttgactctggcatcaccgaggtccatgtttatcagccaggtgatcggcaccgggatgggctgtgtcatagctccctgtgtcttctggctcttctacaaggccttcagcaatattggcacaagcggcaccgagtacccggcgccatatgccatcgtgtaccgcaacatggccatcctgggtgtcgatggcttcaactcgcttccggagaactgcctcactctctgctacatcttcttcgccgcggcgatcgccatcaacctgatcagagacctggcgccgcacaaggtctccaggttcatcccgctccccatggcaatggcgatccctttctacattggatcgtacttcgcgatcgatatgttcctgggcagcgtgatcctctttgtgtgggagaagctgaacaaggccaaggcggatgcgtttggacctgcggtggcgtcagggttgatctgcggtgatgggatctggactcttccccagtccattcttgcccttgccaaggtgaagccccccatttgcatgaaatttttgtcgagggcagccaatgccaaagtggatagcttccttgccggttagtcgtgccatcgtgatcaattgatctttgaagagaacatttgcaaggagtgcgcgccatcctgtaattatctcctccaaatgtatttccagatcacttgttttgtagaaaagccaaatctgggtttcccgtaggaaagaagcatcccacaatccaaatgtaaaaacgaggaaaaatacagctgcaaccaacaaccgttttatcatttgctcgacacggattcctgtagagattatcctttttaacgaaaatggcatgttgaactgagaatccgtgaggtctagcaggtcaggtttcaaaactgagctgacttggaaactgccttttgagcttatgagtgcatctgacaggtttgccaatcaaaactacaagcgagctcattttacttgatcttctcttgagctaatttaccatcctatcctattgttggtttattaccagcataagtgcaacgagcattgaaaattttgaaaatacaaggcatggccaattgtagatcaagaccgacaaacagcgggatgagtaactttgcctgtactgtcataagaaaataagatgcttcaattgcaaacacgttcatagttgtttgaaacacaaaagaagctcctaaagatctaacatgctatcaagctactcgcctgactgccaagggagtagttatttagataaacaacttaattgaacagttaagctgattgcctggtgatctcctgtagaaaaatcacgcgaggcactctgcagtaactactctcgcggagtgcacacatttcttggctccatgcgaccttgaagctgtgaagcatacgtataatattgaatacgatcaaccattcattgtggacttgtaatggtggtcatcgatagtggcatacaaatgtcccagatcaacttggtctataatgattttcctgtgaaagaaagtaggattatgtaaataagcaaaatatatttcagacagtgtgatggggagggatatacccgactgtttcctctggtagattaagacgacggctcacataatctacgcctactccatggtcatcattcctgtatagcacaaattcagtattatctaaagcagagaaactacagaccatgttaaaacattgacagtaccaaacttgtatttggtattagcatggcgttatttttagaaggaaagaggtggccctctcccagattacgtaaaagttactgcatagatattgtagattatgtgtgccgtaaaattatgaagaaaatttaaggtattgcagaccttaaaattaagccctttgatgtgtgtgacatggagggtggagaaccatcggtacaaaactttgaaacatgtaaaagttactggcaaacatctatatgaaagactgaccactgaatcatgggaacttctatattgcagagaacgtaattttaaggtctggtggtatgaaggaaccaaatgtcaattcattattcatgtctacaacttatttatctgaccttttttttatcataagaagtaatgaaagcgtactgcatatctaattaacaattccacactagacagaaacggctgagtgttaaggacaaaaacatggaatattgttagctattctatagcaaagaaaaaaagtcagcagagtttatgcgtgtgaattataatagatcaaagagagaaaactggctagtcaagtgacatctatgggcagaattatcaacaattaacttacataactgctgggtcatgaaaaacattcaagaccaagtcgatcatatttgttccagtaccagtattttgtggtgcagaaaatgttgaggcctgagtagatatgaatgaaaaatttcagacagaaaagttggcatgtctttcttggtaaaataagaagaaatgtccaaaactacctgattagtaagtggactttggttatacgccatgctatccctaggcatagtttggttaggagttcctgttgctgtattagcatttacttgggactgtcaagtattaaaataactcagaaacatgacatcaccgtaaagctcaatagatattgtatggcacaagttaaacaccaacaaatgaaacctttaggatctcactaccttcggcctggtaagctccaagtgcacatgaacgcagtgaagaaagtgatgtgttacatcattgaagttggttatacgcctgacaagaaaccatgaacaaaagcataaattaagaaaaaatgcagaaaagtatttatctggtctggataagcctgtctctaaagcaatatagtattgagctatcctgattcatgagtttatctttgctattgcttttacacacgtcatatgacagacttccaatctaatatagtggtgtgcttgtaggaacaacaaagaatgttacacattaattaacaccaattaaatagccgttagtgattagttgtagttctgttcagcactcacaaacttctgcatgaatactaccccgtttctaaatacagggcacttttgaccactgttttgtacctataatacttggaacttaacaaatcccaatgcaatttgtactaaattcctctattagatatattcacctcaacccatctccatactccattcccgtgccttaattgttaataaggtgcatttttgccactttttgcacaaaatatgattgctttagcaagcatgttttaatcaaaagcgtcaagtacttagaaacagaaggagtattctacttacaaatcattgtagctaagggatcacatcagcattagctgttttattacggtactccctccatcccaaaatataagcatttccggttttgtcctaagtcaaactatcctaagtgtatataaaagtatttacagtatcaaatgagcatcattagattcatcatgaaatatattttcatagtttacttgtttgacgtggtaaatattaatactcttctgatcttcttgttcatctctagtttgacttaggacaaactagagatgcttatattttgggacggacggagtaccacagggtgacattattcaatataatgggccaaacaaattgcagacaattcgctatgctccaaagcaggcatcagtttttggaaatccacgttgcaggttattatctatggaagaccaaagtattcacctcacagagtaagcaaccacctgacgcttcccttgaaaaccttttagaccaccattgacaataacatagtcaccattccttgcaaatagaacaaagcaaacctatcaattttggggcgtagcaatttaaatttcaagacaagtcaaatactatgtaacccttactgaatgtcagccatctccttagtatcagtgctatcgttttccctgagaaaaaaatagaagtcagtacaaagccaagaaattatccaaagtttgttaagcacaataaagcggtacatggcatcccaccagcgattcacaggtaccctgcctgtaccatcatcaagagtgaatgatacatccgtaacccgatcaagcttatttaacatgcgtcctacaagcctaacctgcaatccagggtgataaaaattcaatacacaacatacgatatttgccaacatgtacagaaagcaaactgaccgaagcaaaaccaattcaaaccaagagaatttagattctaaaaaaggcaaaatacaattacataattacgctaaacaaaatcataaagaagatagcatcgtattttgaaaggaccatatacatatttaatattttcaaggagctagtttcagctccaaggagttttttttttttttgcccaactatattttctctaccactccgataggcaacctttggcccaaccagcgcaagtacaatgcatacaagaactgtttgtaatttcccaaaaaaaaatggagtctaatcaccacccaatcaatgttcatttccgaacaccaatcaccacacagaagtaggcaagatcgataccgtggacacctccatgccattgacagcaaaattcgacttgtcgtcgttggtctgggacgcgtccatgatctgcttcacggtgagcgggagcagcgcctgggcgttccgactctgaccacacccgcgagccccacaaggcgtcagtccgaggggagcgcaagagatatccaaaaaaaacaaacaaacgagaaatttgggtaggattaggaggggaaggaccttggggaagccgccgccgccgccgctggtcccctccgcggcgttggtcgcctgcgagggcatgaatccgccgccgccgaagagggagctggcgttccctcccccgccatcgtagttcccgccgccgccgccgccgacgccgacgccgtacatcggggattcgggagggccccgcgcctaaaccctagctgcccgccaaagcaaccggaacagacgacagacgaacggatgagcgcgggagaggagtgcggctgcggcggttcagtttttcggcggaaaaaaccctcgccaacttcgcgttggtatttgttccccgtgttgcgtggccaaaggcagggggggtgcagtgcaccgtgcgcgcgacgcgagccaggttaaacgttgacgtgggtgagcggccgtgcagtggtgcgtgcgtcgtgtggtttccactggggtttgacggatcgggcgggccgtgcgctgagcggggcgctgcggctgcagcctgcacggctgcgcgtaccggtggatcggattgtagcgcgatagccggtagccgggctaaggcggctagtggtggcgactagcgaacgcgagcggctcgtgcacggcacgagtgggttgggagtttgggacttgggacttgggggagttgggtggatgaaccggccccgggtgggatcggtcgcagcgcgagtccgcgactggggaaggtgccgcacgggccgatttgcaggttgggctacgcgatagcagccgaagtcttctcgcttggtttggggcacttgggaatcgttggcatccgcgtagcagccgaagtactcttttcgatatgtatgtgtagctaattgctccactagacatttgaaagcaagcaatcagtgggccgttacacctgatcacgttcttactatggcacccctcgtttcggctcaagaagcagcatgtggaaaataagaggattcagattcggtgacattgctatagcatggcacggtgtgatattggatcgatctggggcgttgaaaactaatccaacggtccgctgcactggcctacctgcaggactccgttttcaccccacgcgcctacccttcctgccagacgacgtctccttcaatctcgccccaatctcgcgtgctcgcatcgccgtttccccacgccaggccgaagaggcgccaggccaccgcgccgcagcgagtggggaggggaccgggcggctgcctcgtcgcttcgcctccccttgcccgcgtcaggccaccgccgcgagctagctgggagccgccgccgcgccaggccggagaggcgcccaccaccgcgccgctgcgactggggaggggaccgggcggccgcttcgcctcccctcgcccgcgttaggccgctgcgccaggccggagaggcgccaggccgccgcgccgccgcgagtgtggaggggaccgggcggcggctgcgcgaggaccctgatgtatctgaactctgtgttgtttttggcatgtgtttgatatttggagttccatctcgccaattctactgaacatatgctagctaatccaacagctagcactaatcgagcaacagagccaaagcacccaactaaaaggggaacacacagcaaaattgatgaagcacaggggcgcgcaggcacctcttccgcaccgggaggcggctggacctcgtcgatgtcaggcccggcggccagccacctccacgcgcggcctgccgcggcggcacggcagggccccggccccggcctcacgtggcggccgcccgaccccctccacactcgcggcgacctcgtcggcctgtcacctttccggtcacggtggcgacgactctcccggattcagtggcgacactccccgctggctcgcggacgcgcgcaatgagaaattgggggcatcgtctcccgccagtagtggggatgaaaacggcggtttttttgcctgcgtgcgggcccaactaaagcagacgttggattcgttttggatggctcagatgcacggtatgtcatccggtgacttgccatagcaatgtcaccgaagctgaatcgaggatcatggcatgcgcaatcagcggaattcctgacaccaaataggccggtgcaaactgcaaaactccaaaccgctacccattttaagaacccactagacagaacccggaaaagctaattcatcagtcgacagggcaaactttaaatcctgacaaaaaccttttctttataccaccaccccatcccatgtgctccacacttatctgcatttccctccagcctatttgtccctttgctcttgcttactctagtatactcctacttcccagcctttatagccttctgccttcttcctcacctcacatattttttttcttggacttcttggcgatggatcccccaccggctcaggcgatgaacaccgacgacttcacggacaagaccatggatgaatggtaaggagggtgcctgcgccatttagttctccctgatcttctcatcttgctctgttttctccttgattgattggttgttttttttgtgtacgcagttgttcttgctgctacgattgctgctccagcatcctggatttcctctgctgttcttgatgctgcccctcgtcaaccttgcagaaacttcatgggtgctgacgatgagtgaatcagaagtctcggtgatatattttgggctgtacaagttattgaattcttagattaattcttcctcccttgcgttgtaactgagatttgtgcgtcactttatggatgattttgggaggaaatttgtgcactatcaagttctgaaacatcgatttgtcttccagccttttgcggtatccctgaagtgttgtatatggtatgaaaatctcttgagttcccctgatgatagttgatgcttcgtgccatcagcaaagtgtaactcgagccaagaaaattcatgcacgacgatggtgtttgaggctagttgatggtgtctgattgaatgttgaatcggagcatcatgggctagcctttttttttagtggcgttctctcttttgctaagatgacatcgtgacaactgactggctggctggctgacagcctgacctgaagagagtcccacttttctgtccattgttagcgatgatgtcaacagggccgtttaggccttattcggaatacatgaaaaacgtagaaaaatttcctccacttttcctatatcccaatcctccatttttaatgatttagtagtgttaattcctaaggaatttgaatcctccaatattttctccaaatacccttcaaaccgaatgagccctaaacggcctgctcgatcggttgctctgttatgcgccctaactagtaatagaatttacttacataaacggggtattaatattcatccaaacatcaaccatggtgtgatggtgatcgaaaaccgagcaaacaaaagagagaattgtcatgaatccgacgagacgatgcacgcgacgacgacggtgatgtcgtccaccttcccgccgtaaaagtgcccctcctcgttctcgtgctgcttccgccactcgacggcgaacggcgagtccttcagcaagcagcgcgacatctcgtaggcggtgccgccgatgatgtctgccatgttcttgggcgagaagcccagcgccgtcccgatctgcacgaccttctcgagctccgcgtcggacatgttgtcgaacaggccgtccgtcccggccaccacgacgtcgccgcgcctcaccttcatctcgcccaccatccccaccgtcatgccttcgtcgccccgccggccgccgaggtagtagggggcgttgaagtacctctgctgctgcaccgagcgcaccacgaccctgccgtcccggagcacggcgaaggcgctgtcgccgatgtacgcccacctgaggacgttgccgtcggcgagcgagaggatgaccgccgtggacccgccctgcgcgccggactccagcgtctcctcgtaggcgcgctccagcagcgtgtaggggcagacgggcgtgccgggctccgccgtcacgagctgcgcgaaggcgctcgtcatgagcccgcgcgagaacgcgccggcgtccacgccgaccctgcggcggtacccgccgacgacgccggccgcgtcgtgcacgaagtgcgcgtcctcgtcgtggtcgggcacgtagcacgacgccgactccatcctcactgcctgctggacctcgccgtcgccatgcgcctgctcctgcgcctgcggccgcaagaaggccgcggcgaagcttttgacgcagccgtcgtcgtgggggagctcgactgtctggtaatggtgctcgaggccgaccgcggcgcggacaatgtcggggactagcttgctggtctcgcgcagggtctctttgatctgctccaacgtctccatacgtttctccatctttggttaagagtttttggggaacgcgtgccaggctacgtagacagtgatccattaataaatagcgcggcaaacggtatacgagtcctattcgcactgcaggcgatatgctgtccgatatgcagttggagtcggagatcgagacggattacggctaagggcacttttaatggcagaggcgagtatgttcttttaaacaagattatttagagacgtgtctttataatagttgagacgataaagactctaatcattaactaaaaaagtattcattttacatattatagtgattaagagtcgttgttaagctgttgttatgcataacaacgatgttttgtctctcatctttctctttcttccatatcaacaaatatttctaattagcaatgctaagagaccactattgataaccattgtatatgccctaacaatcaacacaacatgaaacttgggaaactatctgaactatcaaggaaatacacactcactattttacatatcatttactgatttacatggttataaaataactaaaacaaaaaataagataaattaatatgcgatagaattactccaagtagaaaaaaataaatttgactaaaaatataagttaactggctataatttaatttattctttttctacaacttgatgaactcgaattttaacttgcactattttaattgatatatcatgtattaatctatctttttttttctaaaaaaaaagcatatttcacacacctaaactcttacgtttgtctaaaatacaccgccaaactacaaaactagatataatacaccacccaactatcaacacaatacatgacactttacccagagatgttaaggtgggttttggtgcatgtggacgctacattggccaagcccatatgtgaggaataattaactatttgccactctttacaagtggttctaaataattagattagtttgtctagctgttggcatggagaaagcagcggagactgcggctcagcagtcgctacggtgaaggtgcgggggtgagctgcaatagcacgtccttgagcggaggagaaagaagaggatgtgcacgatgatggcaaaatctctacttcgtgcttgggttgtcaaagtttgtcgtcactatccattcgccttgagctaagaacgtcaactcgggctccagcacccgctcctcctccatgagcttcacctctacatcaagcttgggctccgctgccatcgccactctcgcttcctccccatctgtctttcaccgccactcacacacacgcacacacacacacatcgtcgtcaaaaacgtcttatctgagcttagtcgatggggctggccccgtcatcctcgccagcggagggagaggagagggagtaaggagaggggcggtgcatcggcggtggccggttagcacgacggcaaaacgggtaggggactgggaacaaatcgaagagattgtcgtcaatggcgtcctcgccgcgatacttctgaggatgccgaacagccgaagacacaggaaggtggagaaagataggggagaggtaggtctgacatctagggccttctggctttttaatacgtgcatcctacgtggtgtccccgatatcatactaaacaataagaccttgttcggttaatccccatgagggatggattggaagggatttattccacacctattgtggtgtggaattattccccctcaatcccctccaatccttttcaatcacctccaaaccgaacaaggcctaagacggagtaatgagcacggtattgatagttagagggtaataccttattttaaagttcgagggtgtattttagacaaaaaaaaaagttgatgctgtattttaaaatcatgattatgtggataacatgcaaacaataaaatatgttcccctgaaattcttgtattatgtatttctcatattaaagcgcagtggacgaattataaaagtagtatcggtaattatcttagatcatccaattgaattctcataataaaacagaacgaacaacgaacaacagaattatcctggaattgatcattatgtatatacaccgtaagacttaatacaaatcttaataaagcctttaacaaccgcataatacaaggattttgctcgagagacatcgatcgacaagacgacaagctgatcgatcgtgcaatttagtatgctacagcctacagatcgtacgtacacccgtgtagatcatagaatgtacaccaatgaccctatgatcagacaatgtaggcgacgacgacggtgatgtcgtccctcttccctcgccggaaaatcgtcccttgcttcttccggctctcgaggctgaagggcgtgtctctgcccatcgtcgtcgacgcctcgtaggcgaagccggcgacgacgtccgccgtctgcttgggcgacagccccagcgccctgcccatcgcgacgatccgctggagctcctcgctggtcacgttgtcgaacagcccgtccgtcccggccaccacgacgtcgccctccttcacctcgacgccgccgcgcgccgccgaggtgacgctgttcccgttcttgacgctgagctggaacgggtagttgaaggagtggacctgggcctcggaacggaagaagagcttgccgtcgcggaacaccgcgaacgcgctgtcgccgatgtaggcgtatttcagggtcgcgccggcgagcgacaggatcaccgccgtggatgccccctgcgtccgcgccgataccgcctgctcgtacgcccaccccagcagcgcgtaggggcagatgccccccgcgccgccgggcgtcgtggccacgaccatctcgaaggcgttgtacatgagggcgcgcgcgaacgcggcggcgtcgacgcccggcgcgcggtacccgccgacgccgtccgccagggcgacgacgcctgcctcggggcgaacgaagtgcgtgtcctcgtcgtggtcgggcaggaagcacgacgcggcctccatccgcagcgcccgcgccggcgccgcctcgtcgcactccatggggtcgtcgccgccctccgggcaaggccgaggcaggcaggacgcggcgatcctcgtgacttcctccagcgcggcgccggcggtgggccgcaagcggaggcccatcgcgacgcggagggcgtcggggatgcggcggtcgatctcgctgagggtttgccgtatctgcggcagagcctccatgtcgcaggatcgggttgggttgatcgcgtcgcgagcgtgcgtacgtagtactgatctgagtgcgtgcactcgttgccccgtggttatatagcccgttgtctcgtcccgtttctgcttcggaatcggcgcttaacttgtgatccgattcggcttcggaaacactaaacaccgggggtcccgaattttccatctacaccgaacgcccgccgtgtccgccgcttaggcgctgaccaccgtcttgccaccctcttttgcacgggtggcatcgttggaggccgtcgcctggacccctgccacctccgtccggaccaccatgtcatcgtcgcgaggggagtacgtcgtcgactgtggttgtggcggaaagaggcacgtcgaggagccgcgggtgggggaggctgtcgagccggcgaccgcctcgggccagcctcgttggtttaaccattttaagtaagttcatttatccatggtttaatagagtcaattcatcataagtctattatatcaataggatatacatggatatccaaattgatcatctatgttactagtagacaaaacaaattcttattacatgtatgcaaaacttgggcctaaaaacttttaaacttgcgttcacattttaaaaacttatcaaatttagttgaattttgtagagatgatttattatatggagaagcaactttgtacaaattttaagccatttagacatgcccccctatatatgccgcattactaagattcaaaaattatagttacatgtgtgtaaaattcggacccaaaatttttaaactcgcgttcacactataaaaacttgttaaatttagttgaattttgtaggaatgatttattatatagagaagtaactttgtacaaattcttgaaacatttatacatgtgaagtcattttaggtcgaaccccttaaatctaggttctaatggtttaagccatttgatccatttataattttggagcgaccctaaaaatccgttatgacaaatttacggataggtttagtgaataaatggatcgaccatacccattcccatcctgactaatcccaaccctggatttgccatggtgccttataggatcggtgttgattatatagccgatagaaataacgaagataaagtaagctaattgtggttatatcgatcataattttataaccctcccaccatgtgggtttatgttttcgacaaaattaagcagactgaaatctgtgaaattttgaggtttttggcatgggacggaagtagattccaagtgaaattttgactggtttttgtaacgccccgacatttgttagccataaacacagctaactcacaccggggtgttatgcattacctgtgatatagtaccagtcccaggatacactagctggtactcacagaataaatatggaatcaaagtaaactgctttattacatcactgggtagtagtccttacaaacgttgctatcatggacatgcccatagatgaacaacacaacattacagaaaaacacaaaagcgatggcgcagaaacgaacagcgtggagtactaagcaactaagtgactacgcactaggcaaagaacctaggcaactaacttattccacaggcgaggcttggggctaggcacgaaacatctaaaagtcttcatactcggcttgctcctggagatacttctcggcggtcgggtcgacgtcttcatcttcaaactctatagattattataaggggcaaggatgagtacttaacgtgctcagcaagccaggtgtcacgccccgaactagtaccgaccggaactagcccgtgacgctccaaattaacctgttattcgataccagtcccaggaaacagtgctggtatcacaggaagacagattatcacagcaacagaggtctctttattatagagtagaggtacagtcatgttgggctgcggacagaccccgagctcacaactgcattacaaaaggaaagcggaagccaggactaggaccaaacatcacaggcgcgacttgggaactaggccgaaaccctaaaactcatcgtagccggcttgctcctggaagaactcttcatcagcaggatccgcttcatcttcttcagcaactggggggattatttatatagagcaagggtgagtacgggagtactcagcaagccaggggaaataagtgtttaatgcaggcttcaaggagagactgttgtttttacaattgattttatttgaactcttttctgaaacaactaagtgagtgcttctcaaacgacacggatgagacagtgcatctcgtccggtcggagtatgtgcaatgtatcagtctttagaattgaaacaaggttggcacccggccaacagcttttcaacggccacccgggccaacagcttttcaaacggccacccgggccaacaacttttcaaacggccacccgggcctagctgataccattagctacagatttttcaaacatcgaaccccttttcacaacagcaatttcacaagcagtagttaaacaaaactacgctaggaatcacctcacatccgcccatgactgtgggcacggctgttcgaacagtttgttaacctctgcagagggggtacactttacccacacgacattactaacccggatcacccagcccgtggggatcagccacgtcgggagacctccaagctttcatgacaaggcatttccaaagccgacacaggtttaccatatgccgacgagaggggtcccagaccaacaacaggttaggtcccagaccatactgtgccaggaagcccaggggtcctccccgacaccaccccggcgaatccacatgtctctcggcatcaaggctcccctgataagctagttactcagccaggggtgtcccattccacccatgtggtcgtacttgtcttatgtttggatgaaattccaaggaaacggtccttaagtgcaagagcgggaaaccgtacacccggtacgttccccggtccgcggttttggaaattcatttagttcgcaagcaccgacccaggtgtcgggttttccaagtcttttgtaaaacccaagttttacccaagttgtttttcagattttaagtttgaaggcgtccgtcgatactcgcgcagggtgcacgaatatcgagacgcaactggatggttacaaggggacatggtatcacaattaacaaaggaaggatcaaatgcaacaaattaggtaggtctgccaatctgccttgcagacgggacaacagattaagtgcgatcctatcaatgcataatatttttcaagcaacataattaaatttcaaatataggctcaagatgttcaaaggtggcttgccttgctcgagatctggagcttgatcctcgaaatcctcgcactgcgggtcttcgggctccgaaactacacgcgaaacggggcaactcaacaaacggcgaaaataaagccctattaatgacctctaagcgtgccattagatagatctcgagatttgaggaattttggaagttgaacggagtcaaacgggtttacggttgggaagatattgaatttctaagattattggatttttggtctaaaggaaaaatgatttaattaaatcctttttgaaaaagaaaagaaaaggaaaggaaagagggagggataatagacttttcctcgggcggctagggcgcggcccgagagaaatggagcggtccgaccgagctaaatgggccggccggcccaaggcgcgcgcacgcgggaggggaggagagagagagccggttgaccgggctcaccacgcgtggtcccgggtgggacccgcttgtcagcggctcggctcaccgtgcggagggagcacgcggcgcggcgctagggtgagggagggacgtggtgcacgcgcgcggcgcgcggtggacgcggatgcggcgggcccacgcgcagcctcacggctcgcggtggaacgcgcgcacggggaaggactgaccgagatcggctcgacccggtctttggctgagctggcgccgacgtggcgcctacgtggctgccacgcgggccggcgggaggtagacgacgacgccggccggaacggacggcggacgacagcggcgagcggcggagcgaaccacggcgatacaggcgaaggcaagcacaccgggtagctgcacaggatgagaggagatgagccaatggctcggattcgccggaggatgcccgacggcggcgaattgcggcggcggcatccggcggcggaagaagggggaaacggcgacgaggtcacgaggggccgattcccggcggcgagagcatctacgcggctacgggaatccgatgctagcgtcggattgggcggagctacgccgagcgaggccggcgacgagcgggtgctacggagctcgggcggttacggcggcgagcacacggcgagcgacggcaacggtcggggcggcgccggctagatacggggaggctacacaagctactaccgaaaactaaggggggagatggagcgaggagggagaacggggagatgctctaccgtgcgggcgggcgcagtgacgagaggccgacggcgcgggagtaatctctccggcctcgggccggggaagaggaaggagagggcgcgcccggagtcctcttccgcgtccttgctcgtgccggctcctccgacacgcgcaatgacgaacggcgacggcgaacagagcacgggggtggcggcaatggagtggaggcgatggaaggagaagagagggagggcgcccggggctttaagggcggcaatggcggtttgggaaccgacttagggcggtcaaggcgcgagctggcgctcggcgctcgcgtccaaatcggcgacagggcggagggaggaggatgacgccggcggtgacggaaaaaggagaaaagagggagagaaaaggggcttgcctccttgccgctttgggaaaaaggaggaggggagcgggggcgtggcggcagagggaggaggggctctgcctccgtcccttggcggcttgcgtgcggagagacggggccgaggcgatgacggcggggcggtttggagtggcgcgacgacacgggcggcaggcgcggcagaggctgacggcggcggcgaccaggcggtcggccaccacgacacgcgcgcgggcgggaagcaacgggcggcgcggcgatttgagcggcgcggctcgggcacgcgcgctggctcgcggggccgagcggctgcgcggctgcaggcgcggtagggcagcggggccgggcggcgtggacggcgtggcacgggcggcaaccacgcgggcgcgcgcgcgaacgacgcgcggggagcggcagcgagggagcggaggggagggctcggctcggcgcgggcggctcacgcgcacgcgcgcgcggcgcgcgggcggagcggagggggagagggagagagagagagagagagagcgccggggagagagggggagatgggccgagagagattcggcccatcgaacccgggggaggcaaaatagacttttgcggagggatttgatttgagagatttggattctggattgaactcgacgatagatcggggatttgagatctgagatggcacggacactagacaacaagcaaggaaacaaatttcgcaactagggtttttaagagataattttcccgctaggcgccacgacggaacgggcgctacatcagggaaaagaatgacatgtcggtttaacaaggaggctacggttttatttgtgaaggctgccattttggcaaaatgatttatttcacaaaactcctagtgagtgagtcaagttttagttgtcgggaggaggctcacgcctcgacccattccacaagttgctttgcaacaacttgtcacaattaacgaacaacaattaaattgttttctctattagttcctttttcacaacaacacagttcacacaaatctcctggttatcccagcacatcaacgccatcatggccctaacaacacctcggtgtcggacgacacctcaggtcacacagacccgttcctaaccacaaaggttagctgtctgccacacaggcggactctggtaacgttcccttttcagtaaccacttttccacaaacctttgtcaaacaaatctacgctatgagaaacaccttacactcgcccttgaccgtgggtatggctgttaaaacagttcattaatctctgcagagattgcacgctttacccacacgacacgaaacttacaccggtactggccggtaccggaagttcgtgataaggcctttccaaagctaacccatgaaaatcgcataccacctagttgggcaaagatccatagccgagtatcaggcaatgacagccgtcatccactcaggaaataccgaggatgcctcctactcctactggtaccacgccacaatagaggcaaaaagacacccatgatgggcaataaatgtgtaacacttcgtctcctcatcctcggtattgcacaaccattggcacaccaactcccatgtgaaaacaatttactcagccagaggcatcccataaatacccgtgtggtcacactgtaatgtgttcggatggatttcccaaaggaatcagtccttaacgacaatacgtggccaaaccacaaaggcttgactccgcatcatcaccactttcacaacacattttatttcacaactactttaatcaggtaatttggaataacccaagtttcccacacggcaacaacgtaagcatggctaagcgaaactacctcggtaatcgtgtaacaataccggcacaaacatttgtggagctatcaaaggtatagaaacatcaacctatgtaatataagtgtgactactaggttggtccgtcggttgtataaacaatccgaggcctaaacatgttaatcgtgtatgctaagtaatgcacttttcaaacaacatatctttgcaaatataggggcaaagtgatcaaagaggcttgccttgcatagggttggggtcttctccttcgaaagcggcgtccggagcttcctcgaactcgggctcttaacgcgaaaacaaagctaataaacaaaaggcaataaaacaagctcaaaccagagaaacaatagcgacgggatagatggagtggacggcgacgggacggggtgacgcgaggcgacgtggctccgtgtctcccggagagaaaccggagcgaggtcgggcttggcgcgacgcgattttggcgtggcgcggcctcggcctggtgcggaggcggtgcggcgcgggtgttggcacgacgcgcggcgcacgggagggtgttttggtgcaacacacggctcggcacgacttggcgtccgggcggaacatttcgtcgaacaccttgtgtgcacgtggctagctgcctcaaggaagaagaggtgaataggagctgggctgggctggccgactggggaggagaggagttgggccgaggggaaaagaaagagaggatgaggcccgaactgaacagtactgcttcacaatttctcaaggatttgtagagtttgaattttgaggagatttcaaaggatttgaatttgaatttgacctaggatgtcacagaaattttaaaggcaattctaagagaggatttgagatctatttggcacaaaatcaattaagaaccaaattaactccaaaattttaaatgacaagatttttaaataaaagcaaataaaatacgggtgctacagttttcgagaattcaaatttgaaacgtaaaaattgatccaagttcaactagaatttgattgaaatttgtgaaaaatgtcataccgctagccgctagggtatagactctcagtatcacaatacaaaagacataaacaaacataaatttgtagaacaatataatagagcaccacatgtatgaagcatgcatgatttaggattaatgtacatcttcgctcttaggcaacaaaatgtttacacgaacgagtcagcggcatgacacatttttttatgactcattaagcgcttcggttaattccttaagatgcttcatattgatcaaactatcctttttctttcacggcaattaataacgttcacgatcaaattaacaagcccctattgtaatctctgtccactaatcccacgaatgaattcctcaatgttcctctttgctacgcacaatgcctcacccgccataaccctctccctcagctcatccagcttctcccgcaagcgcctcccgtcctcgccttccatgatcctcccgacgcaatccaccacctcgccacggtcggcactgcgcagcctgatccctatcccccacgccctgacgatgtacgcgcagttgatgaactggtcgccggccaccgggtagcacagcatgcgaaccccgtgccgtatcgcctccagcgtcgagttccagccgcagtgcgtgaggtagcacccgacggcgccgtgcgcgaggacgtcctcctgcggcgcccacgcgacgatcttgccgcggccggagtactgatccgtgtatccggcggggaggccggctcgccacgacgggtcgtccttgaggacccacaggaacggccggccggtggcctccaggccgacggcgagctcggtgatctcgcccggcgcgatcggcgcgacccatgtcccgaacgagacgtacgccaccgaacctggacgctgctggtcgagccattccatgcagctggttctgtcgtctgcctgacacgtgctggtgtcgttcttcgtcgtcttcattggcgaacaccgcaagttgctgttgccttttgctcgatcagtgacgatggtggctagcaatggtccaacttggaggatttgctggtcctgcggcaatggctgttgctggtcggcgccggcggcgatggcctcgccggggaaggagttgacgaggatgcagcggagggtcttcacgcgctccattgtccggagccagaaggcgaatcttgatttctgggtcgccgcgtcgccgacgagccatggcaaatctgtggtgcttagctctagttcttcggggaataagctgatgatttcagcctggaggtttgcttttacttggccctggtttttgttgaatccgtttgccaatatgggaatacctgtttccaaaaagaaaggggaaaaaattaaaggtattgatctgtaaaaccctaatcgcagctgtaaactgaacattggcacatgactgggggaaattattcttgaaaaatttaaaaattgagagtggatgtaaatatgtaataataggtttggttagaccactattcaacgtgctacttcttaaaagaaagacacgggtatacaaattgctaaataaggatactaaattaattgctatagtgaataaatacagtaagatgcttctcaagttcccaacggcctgtcctacttgtattcttccatgcttgaattgcatccgtatgtcaatgcaatttttaagactttcgatctgtctattttaaagtcttttatggtacatcattaattgttattatatacatgtgtgagcgggtagtaccattaaataagtcatggtaacaatttgatgtcatactattagttattttaaaacatgccattttagatgtgtttcatatgcaaagcttttaaaaacaccattatttaaaatttttagattagatgtacattgtctgtccaaaaatataagcaattgaagcatttaaatattatccaataatatataaattactacactagtatttctcgcatcaaccacttcttaattactaaaatttcttccctttttgccccaattattctcaaaccccccattcatcctaaatgagcactattttttttctcctcgaccttaaatatccttaatccatgataaataacctagaaatatttacttgtttagttggtctttgcatcaggaacaattatgccttctattgagaaatgttgggagtatattgttagatgaagggagtataaaattgtatgcgtgatatattacctcaaaaactaccttgatatgtataggattataagtttgttggattttttttactattttaaaaaataacattcaaagttgcaacctgaagataatttcgatgttcaaaacattttttttttactaaagagtactagccatctatagaattaacgtagtacagtattttgtgatgtgcttatgacaattcaaaagtcatttgcaccagatcgagaattgtagttaaaatagaagaaaaaaaagcagaaagccagaaatgggatgcatggacgttgcagcagcgcataccgtattccgagacgagccccctgtcgatgagctcgggtatggccgccacgacgcggtagctcgccagcatcgccggccagaaccccacggccgccacgccgcacctcgtggccaccgggacggcccacgacgccagtacgtcgacgacgacggttaggcacgctgccctccgtccagcagctgcaaggcggtcgtcgtcgtcgtcgcgcatgagcatgagcacgcgctccaggtgcgcgggcatgcggttctccatggcgtgcacgatgctggcgaagcccggatcgccgtctccgtcgtcgccgcccgggatgccgctggggaaggaggcgagcgccacgccgcctccgccgccgttcccgccggcccgcacgacgcggcggtggatgaaatcgggcaggacgacggtgggcgcgacgtcgccgcgcgcggcgagggcgcgcgccaggtggagcatcggggttacgtggccctgcgccgggaacggcacgaggaagacgacggctgatgcagcgccgtcgccatcgccgtcgacaggcttgcgtccggtgcccatgccgggcggcggccggcgatcgcgtggcggatcgaagaccggaagcgatgaactcgatcgcgtggcgcaacgtgatgtgtctgggagttaaaagatcgaggccgagggcgcggcgcgcggcgcgcctggggagctcggctttgattttagccagctagcgatctctcctccttggtcacgttcctttcaagacccattttgacattcgcttaattaaaacattgttcgcttgtcatttcttaacgcaaagtaaacgctccattccttatcagcggcacctgacgacacggttatccatctgctgatacagaggtctcgtcgaaactgtgtgctaatcctacacctgatgacagagtgggcgaggatgtccgctgtttatactcgtattttttttaaataatggaatgaacatttatactcgtatttaaacagacggtttaatataccacttattaagtgacatttaaattaccatatacctttgtacataatgtattgtatcaaatttttaactacccaaatctgctacatataattaaacaaataacccactagaaaataaatatagctaataaatatagctagtagacatcttatgagaacactgcgcctgccactttcaaccttaaaaattttttaaattatattacaagtaaattgcactggttgtacacgaatttacaggtaggtgcatgccacctaatgcacaagcttacaaactgcctatttagtgtatgaagttgtccagtacgtgcgaaacaatactggagcgacacgtcatgactaataattgtgagttgaaacctacttacaatggcatgcgcacgcatcaaaaggtcataaaaggcataccacatttgtgaatgacctctacttagtatttatttgtgttttttattgtttacaattcattttatccttcatacttctatatattattcccctgtataatcaacatctactattatatatttaactgagcacatgcatgtttctagatggcatcatcctgatatgtgtacatatgttgcatcctaataaaggttcaactcagtaagattaaccatgcatgcttagccttggttcacacagaccatgcaagtctgtgcactgaaataagcatcttgcaagtttgtgtattagattacatccgcctataaaatttatataccactaatataatttactcttaaatcatcaaatttttgtagggtaagaaactaaacataatattaccattattatcctaccaaactttagtaattccggaagtttcctctcataaaaacacaatcaaaagttagtaagacaaaccaaacaacatctaaatttggtaatgtaaaatatgtcaaattttaggtaaggttcgtttgggcaactagccaaacaagcccatatatcacctagtagatgtagtggaatgatggactacattttgcttagtgaaaggtgtaatttactattattaattagtttttacacgagcaatgaaggtaacctaaacagttacataagtactcattattttgaaattcttttacaagtactatctccgtatctaattaaaaaaatacaagtatcatatagtaagtatgtaacacatgttagaaactcttaaccagaacaatacaataatgaataaagtatatatgcaccaatcttccagtatcgtgaaaattagttctgccaggtctgactttcatctgtaatgaaagtgaccagaggagtctcgtactgtccgatttggatatgaacacatatttgagttgcatgttttaaacattgtgtcaaaagacattgcgatctgtcaaactgtgtggaggtcaaactgtctccagaaccctaaaaaaatgggcctctgtatgttaagaaagaagatcacagtagtgtggtccacagaggataagccgcagtagctgaaaggaataagttcactttgtgaccctcaaagtgatcgaaatctaattcgtaaccctaaaccacaaaaccggatatctcgaccctccaactcttaaaaccggtgcaatttgactccctcagtggttttggagagcggtttcgctgacgtggcgcctatgtggcacttaggtggcattagaaataaaaaatatgtgtgagacccatttgtcatccaccaaagtatgggtgggacccacataaaccatgcttcctcatcctccctctctctctttctcttcggcaagcggcggcggcagtcggcgggcggcagtggtgggtggcggcgggagggcaggcgggcgggcgagggcggcggcaactcgtggcagtgggaggacgaggggaacggtggcgggcgggagaagcacgccgcggcggcgacttcgactttgactcctgcaatggcgatggcgatggcggcgtggtcggcggcgaagcggccgaagaggaacttggatacctcggtgaccagcccctttctcgcatagcacgtgcctggaaaaggcgtggtcgcggacgacgacgaaaccgcgcggccccacggcgaggccgaaccgcggaaccactcgaggagagggaggagggagagcgcgccgctgaggaggtcgcctcacgccatcaccccgctacgcggctgtccaccgagaggagaagcgccatgatccggtcgccgcggccgccgcttcccctcgtcctccctctgccacgagcagccgccgccggctccccacatcctcccactaccacaagccgccgccgccagttcccgcccaccggccccggcccgtccctcagccactactcgcaccgccgccggctcccctcgtcctcccactgccacgagccaccgccgccctcacccgcccaccctcccgccgccgccggctccccatgtcctcccactgccacaagccgtcgccgccctcatccgcccgccctcccgccgtcgccaccggctcccgcctgccggtccccgtccctcagccgccgctcgcaccgccaccgactcccctcgtcctcccattgcgacgagctgccgccgccctcacccgcccgccctcccgccgccgccgctggttgccgccaccgccagcccccatccctcagccgccgctcgccgaagagtatgagagagagggaggatgaggagagcatggttttatgtgggccccacatgtcaatgggtcccacccatacttttggtggatgacaaataggtcccacacatattttttatttctaatgccacctaagcgccacgtcaacgccacatggaaagaagaccgagtcaatactgccacgtaggcgccacgtcagcgaaatcgccctccaaaaccgccgagggagtcaaatgacaccggttttaagagttgaggggtcgagatatccggttttgcggtttagggtcacggattagatttcgatcacttttgagggtcacaaagtgaacttattcctagctgaaaacccataaattggtggtactagcaaggcccatgtagggtcttggagatggaaaatgaaacatgacatggccagaaaaaaagagtattgccaacaagtgccaaaattttgacatatccttttgaaaaaagaacttacatcgtatcaaaacattgatgctaagattctgttccaaaacgtaaagaaacaaaaaggataaatattatgtaaggtaagtttaacttcgaagtttaaaaatacaataaaattgataacatatgattctttaaaacttgaactagatgaggaccacgctactacgttagtgaaaaaaaaagggagacaggagattcaagtcttgaacctttgggtagaaacaaaaggtctctacagccgggctatgcatgtgacgctgagtttagattacatggcaaataggtgccaccttagtttggcgctaatggtctttacaattaattttcgatacgatctattttataaatatgttttgaggatcaatttgtcaaaaatttcggcaacaaacgtgcaaaaaagaaagtttccgagcttagctttcacctagaaagaggaaagaagaaatgaaacggcagtttgccctctttgtctgttctggtttctgaaaaaaatatcgaagtgaaaaaaatctaaccggtttctctggctgtaaaccaagccactgattactgaaaagtagctgcataactaaccggacatcgccgtagcagactagcagcagccaggagcccaggaggccaggagtgtgcgtgggacggcgattgtcacccgcacgcgcgccaagtcggagagaaagccaaagtgagaggagccttctttcacgcatcagcttcgcgccgtacagccgccgccgcatgccacatcgcacgctccggcgccacgaggttgctgcgctttctcggccaattggaccccctgccgacttggacccgtctcggccgtcgatctctcttggcgacggaagataaaggagtggatttcatcgggttaacgtgcttgtttttaccaccgtgtcactgactcactttgcctgtgtgtacgccgaactgaacaatctcatcttttggctcctgccgctccacaacaagctcggtaactcagttcaaactgcacaggttgcgctgcactagtagtacactactagctacaaggtctgaacttgtgagctttccatcatttgttgcagaaacgccacaaaattcagtcaaatccgaccaaaatccagcgaaactgacagaagaaaacaaaacagaggggaaaggccacgaacataagaaggaatatactactactattcttatatgggccaaattctttcttgccacacaagcaaggcccaagacgacaggcaccgcaggaaagagccccaagcccccaaccaaacaaaaagatccaagccgaagcgcaccgtctcgccttctctcctcgcctcgccctatccgttcctcgttataactcaccttcctccccatctcatatccccaaatttcacttcgctcgaaatccccgaatccaatccgaaccggcagcggcagccatgacgccctccgccctcgcccacctagcctccgcctcgccgctccccgccttctcccccaagcccagggcgaggcccggctcggcggcggggcccgcgctgcggcggctggcggtggcggcgccggcgccgcgggcgtacttctcgtcgtcgcccatgccgtaccagccgcagccgcagcagccggcggggtactcgtcgcaccaggcgttcggcctggtgccgatggtcatcgagaccacctcgcgcggggagagggcgtacgacatcttctcgcgcctgctcaaggagcggatcgtgctcatccacgggccaatcgccgacgagaccgcctcgctcgtcgtcgcgcagctgctcttcctcgagtcggagaacccgctcaagccggtccacctctacatcaactccccgggcggggtcgtcaccgcggggctcgcgatctacgacaccatgcagtacatccgctgccccgtcaccacgctctgcatcggccaggccgcgtccatgggctccctcctgctcgccgccggcgcgcgcggggagcgccgggcgctgcccaacgcgcgggtcatgattcaccagccatccgggggcgcgcagggccaggccaccgacatcgccatccaggccaaggagattctcaagctgcgcgaccgcctcaacaagatctaccagaagcacaccggccaggagatcgacaagatcgagcagtgcatggagcgcgacctcttcatggaccccgaggaggcgcgcgattgggggctcatcgacgaggtaattgagaaccgccccgcgtccctgatacccgagggcgccactggcgttgacctgccgcaccacagcgccgctggcgtcggcggaaggggcagagatgtcgaggagccctccgcggtgtgagctgtggccgcaaaggtgaaaccttttcgtgtcccatggccatgttgttgttgttattagatccaaggttcagttcttatactacataaacttaacttgttattattcaggttgccacttgttattcaggttgccgatgtgttcggctccttacatgttgtcttgattgcctgaattgagctactgctgatatttattgcaaatctaaggaaattttattccttccatactgataacttcgtaaggtcctttgtattgttgtatctcaactgcaaattcctccttgccaaggcatagttttgcgttctgcctaacattaggggttagagcgtatatgttcattcggttgtctcagtgaccaattagttttcattaagatgtccatgttgatcattcagtgtggtcttgtttgatttaagggagttgattgtctcttactttgccctggtggtttaggccttctatcaaaacaatatgaatttgtgtgctatctaaaaattatgattgatactgtgatgttctgattcactaaaaggtattttcagtttcctgactacacaggaagcctcagaagttacttttttttttaaacctaagccagccgagctggttttatatttcagaaggggagcactgtacagggcctcagaagttacttacttgagacttgtttgttaggctgtcagaatggagcacagtgttcattttttagataatggagcacagtgttcatagatggctggagtaatcgactaataagaaaagggtttatgatgtaaactagctgaaaggtttgaccatcttttggtcaccagacatatagtagataatcaatttagatctggataagttttgagctggaactccatgtcagccatactagtgttttgacattcatcattgcagttctgggcattgtagcggaaggagtcatttgacttttgattcttatgaagctaggaaagatgatctgaatcttaaagtagttaaacatgacaagtttggtatattacaaacttgcataattttgtttaatattcactattctgtgatcaaaattgttgcatttatgtagtactccataaactatgatctgcatatgaactagaccaagttacagaagtggattgtttttaatgaattgatgcttggggcttaacaggcatggagcctgatgctttttataacttcagagcatcatcgtatgaatcgggaaagcagaggttccacgatcacttgttcatcccaacctggatgggtggatcattgaattatacctgcacatacttggtttagtccaaatgcaggtaatcgatttgtatatgaacacaattggatgagacggagattctgtaaggtccttcaaattgaggattcaccaattcaccatatccacctattctgatgtaaatggataccttcttaccggtatattccatagtgacatgtttgaaattccattcttgtgtatttatctgatgccattttggttaggcctttcgccctggtaaaatgacttttttttaatccaatgtctggttactttagccttttgcactgaacacctagtttttttttaatgaggacattacgtccttcagagcagtttcatcatcggagcatacccagggtttccctgaacataccacacacttaaccgattacagaggttcgcttggcttgatgaactacgaggagttcccaacttgactatcatgccgtcgcggctttgcttcagtgaagagcaagtttcattatccagactaatttaaaataagtgaagcacgaataggaaactgagaataatagaacatcggttaggtgaagaacaatgtcgtatcaaacgagcaggaaatagcactgttgctggtgatgcttaactaatttaggaagagattatgcagggctcaagaaaagtatatggatacaaataccattgtccgaaacatggaacttcttcctttcggtactggaatctaagcatcagggcatgtagaaaatgcgccatgccctctcatagcatcttcatgcaaggtgctactccctctattccaaaatataacaacttttagcacttagaatttatccaaaatataacaatttttccaccaataaaattacaatcctccaccatttacttttcccacctacctccattactcattcaatcacaactctccaccactcactttacctactttcttagtaaccgtgtccaacctactttcttagtaaccgtgtccaacgctaaaatttcttatattctggaacggaggaagtattacataataaaagtatccttataaatatcctcttctccaatttagaagttcgttcatataccttacggatttcctactaaagcagcatatgtctacgagccccatcgtttaccctaaaaagaataacccaaaatcaaaatttaaatttgaaaacttaattttaagatattctcaacgtaatttctctttccatattggtttttatattgctaagaatacatataaaaatcttacacataaattattatctttttctaataatctattacaacctataataagcttttaggtaaccgatgagacccgaaatgttaaaatcaggtaattgttcgttctggaaaaagatcagctaattgcaaaaagtaaaaataaaataaaatgcagagccgacccaaacagtaacgggctaaagtccacgaagatgtgggggcggcccaattcccgacgccaaaacccttcttctcacccaccaccagtagactgatcgccgcctcctgattcccgaagctctcaacctcaccgctacgccggccgctggcgtcgtcgcgctcttctcgccccggcccgcgcgaccagacaagcacagcggccagcggccgccaccgccagccaagccaagccaaagcaggcatgggctccctcttcatcaggttccaagaggtacacacgctttctctcttcgccgtctacatccccccgcaaaccatcacctccggatcccgatctgctccttgcgcgagcgagagaagcgccgtggatccggttaacacgcggatttcttttttgtttatgcttgtggaatctggtggcattttgattgtaactaggctgtgggcaatctagtttgtatagttgcaagtcattgttttacctctgttgcgctctccgtcgtccctgcctttctttcgtagaatttcttcactttcttgtgttgattcggttgatgtgtgcttgacttcggcacactctttctaatgccgactcaaatgactaaatgaatgcagtgcttgtcccatcgaacaacattatgatattcattttgtcggtactttttttttgttccaattcattaactgatgcatttccaggctgtcaaaacactggctaagaatccgatgtttgctaacaatcgattgtttgctcgagatccaaggcatctccaattcgaagctgacgtaaatcgcctgtttctctacaccaggtttgccaatatctgaagaaaaataccagttccttttcactgtaatatgccgcagatggatatccagttatgtgtatgcagcatgtagtttttgtgtttccgtaaataacgaacacctgaaaccactatttcaaatttagtttaaataatgtaaacctctaataagcaataaaagcaattaaggtagtcgttggattctcatagtttagatgctacacacacttgatcttcttgaaaccctttggttagacatgtgcatctttcaaactcttctgttatcagcaactggcggatcatcccactaaaatatatgatttattattactatgttcaaaatgttaattcaccacagcctttcaactgcattatgaagatgactattttcctaacctgagttcttttcgatgtgtgctcagctattaccgtttgggggctaatgctgaagagaaggacgcagaggagattattgacatggctagcaaagcttctgtttctgagcagcagaagcaagtacaggagaatgttcactatcaacttacaaatatgtgtcaagcaatggatagcattcttcttcctgatacaaaaaatggtgcttcagaagctaataattatcctcggcgtagtgggttgagtttcgctgttggcacaggagttgcatctgcaaacaagccaggtaatttgttctaactaaatgcattgaattagtacatccgcagttctccacttgcatacagtatcagtcaaaattggttagtacattatgtgtttgcataagtaccattagtaactgatacttttgactttttttttgcaccaaagcatacttctgagttcaaatatgacaatcacagtacagtgcctgtgttttcatttcaaatcttgatcattcgttggaaagggacgaagtataatattgttcatcagatatgacaagtacttgcttggctagcaaactgcctatttttgtgtacttcgcttatgcttcagttttacgtaccatgatttaacatccttaatcaattttgtgctgctgaagtaggctaaacagaaataagtatatgcattatgttaaccccatatctctgtttgcagcgaaatttttgtgttcatcatgtttgttacatttggagacacagttacacttacatatttccttttatgagttgaatcctgagaagcttagttctgatccatttactctgcagtgcagatgtcccttctactaggcctttaaatcgcgctgaattgtcaaataaatttagggatcactttcaatacacccttgacatcaggccgtcacaaatccctcacaaagatgcagggcaaggtctgttcttatctggagaaactaatgctggtgctgtcctagccatctaccctggagttgtatattcacctgcttattatcgatatatccctggatacccaaaaatcgacgcgtgcaacaactatctgatcacaaggtatgatggaacaataattgatgccaaaccatggcaattaggtggtgatagcagagaaatatgggatggctcagatttggtggattacaatgcagtgccatccaaaagccaagagagcaactctgatagggcatggaggatgctcagcaagcctctgaagaagggtcacactgaaaattttggggaagtgcttgaacgacgaaacccactcgcttttggtcactttgcaaaccatccaccaaaagggtcaactcccaatgtcatgatctgcccatatgattttccattgacagagaaggacatgagagtctacatccctaacattacttttggtggtgaagaagagcccgttacaatgaaacgatttggttcattctggttcaagtctggacgttctggtaatcaggaaggggagtctccagttctgaagactctagtgctggtgagtacaaggtccatatgtgatgaagagctcttcctgaactaccggtacagcaactcgaagaagcgaccagagtggtatatcccagttgatgaagaagaggataagagacgatggagctagttttgcacatcttagctgtgagcctgtaacaattcttcctgcattgctttctaacaattatttttgtcccggtgtcgatcggcaaattgcaactgggagtgatttagcttctgaagtgagatggcaattttattatgctcatctggagtccttgatcttaattaccattttggtagagtgcctgttctatactcttctcacaaggcttttgtaatgcataaaaaatatgagtaccaaactaccagttacatggtcattagtcctgggaactatgtgttcttaatcccaatattcttacggggaaataattcatcaatggttatggatatatcattacggttgctaaataagtactatcatatggttgtgcatagaaaagggaatcctgacatttttgctgcctgcctttcgttgttttcttatatgtaacaagtacaaaacttatttccttattgaattgatttaccttttaatctgactgtcaagtactagagttgtcctagaatgttcgccagctagttttggcatttcaagattagaatatcatggcatagagtccaatagtagtttgatagtttgattttcttgatcatttgccaagcaaatattagttcattggtgcagtggtgctatagccatccatacatctgaaacatgaaagatgagcaaatacagcttttatttcttatctagtgatttcctttgagatgatcgtcatatagagtagtagtagtagtagtagtgctggtagggctgcttcaagttgctcaatatcatgatgggtatccagtattgtggtgctcatctgtcctgaactgaactcatgctatagtgcatggccaaagtttatctaattgtgccttctttgccgcattacccgttcttccgtgaaattcccgcttcactgaatgtcatgtatgcaagttgactgctgactatgcactccattgaaccatgctgtattgctgtctgcagatggacgtgtttctgctcatctccttggaatatgcttgcctggtgactggtgctatctcaatcgattctgaaagaacacactgttctttgctaagatgataagaaatgtactttggtcaaatggttactccgggaagccttaagattttgattttgctcggaggaagactatccaccaagttagctggccaatgtattttatgatctccaggattaaatcttgtgttgttccccggtattttggggttgcaattgtgccttcgctttcacatcgagcatcacttgttcagattggtggcaacatgctgaatagtgaatattcattttctgttggagctgaatattcaattgatgaagagcatcaaatcaagtttatcattacaggaagtatctatcctcctgcgagttaattaagttgccaactcatttgggaatggaacaaaaaaccaaattattgagagaacaagcaagcttgctgtcagtttgtcgcaacgtgttgacataaaataggttagcaacagcacaacgagacacattattgtactaaagctagtgtttggggattagtttcggtcggagtttgtctccacctgatcaaagcttgatattgcaatatactgacaacaactaatgagatttcttgaggggatgacgatcatgattgattcaggccttgtttaattcgcgaaaaaaaaatttttagatgtcacatcggatgtttgaccggatgttggaaggggtttttgacacgaatgaaaaaactaatttcataactcgcctggaaaccgcgagacgaatcttttgagcctaattaaaccatcattagcacatatgggttactatagcacttatagctaatgatgaactaattagacttaaaagattcgtctcacgatttccatacaaactatgcaattagtttttgtttatatctatatttaatgctacatgcatgtgttcaaagatttaatgtaacgtttttggaaaaaaaattgggaattaaaccaggcctaaatggtccggcatatgagatgagctgttgacttgttagtttaacgtgccttctcttccttgaatatctaatttcttacttgaacttttctttaaaacatactaaagaatcctgatgcttcgagcataagggatgtttttaattgctgaacttcacctgttacaaataataggatgttttagatttttgtcgaagttttagaagtacaatttataatagcatattaaggtatataagtattactcaagaaaaaaaatgatggccaatactatttctatgtaaccaaattacatgttttccacgtgtattaattgtcaaatataaaaagtagacttgtaccgcctacattttgagatatagtattgaatttaaccatctagaacaaacatattcaggccaaatcacattttgcttcattattaagtttaagaatggtttggtttgtgcccacaagtcacaactgaaactgctacattttcagtgatgatgtcgctatatgtgcaattcttaggttatcatcgtggagtttttttttttttgaagtacaaacattgtgaagaaatatttatttgcagtatcttaagaaatctagaattatagtacttctctcttttttaaaaaaaataatatcatcatcctttgcacggaatacgagagagagagatgtattcaatctaatcacatagaataaaaacacattctgttgaccaaatcagaatttgcttcctgcttgaatcttgatagcccatctttctggtgataacttaggaatttttttttatatgcggccctactcttcccaatacaagtttgacagttaacagctccatcgttttctatcagccgtcacacttattaatggaaaaaaatgacttatcaatgtaacttatatatatatatatatatatatatatatatatatatatatatatatatatatatatatatatatatatatatatatatatatatatatgtttttagcgacttattaaaaaccaataaaaaaagtaaattaaacatcaaaattaactctaaaattaagcatcctgacttgcttgtcttagtacaagatttaccaaattgcctaaattgcagggagcgaattttctgtaaaaaaaaagttttggcaaaacaaaaacattcaggaaagacatgtgccggccgaaatgccgaatcgattcctggagcttggaagtgcattctctgtaatttccaaacggacaaaacgatgtagtagcatactgcgcacacgcacaccttcttactgtaatttagcttaaaatttaagttgaaacaaaaagcgaagccaagaccaaagtttttttttgaacgacgaagccaagaccaaagttgtccggcaaagctctgtcaggccggcgcaaagttcatccagaacttcgaatctcaaaataatactgttctttccgtcatccatgcaatgttttggcatgttgtacacagaaaaaaaaaacactgatctcagttcttactcgttagctgcacacgctaaatccacccacaaaacgtcaagttcagagactgcttttatgatctcctgaagttagtaaacaagcacggaagatatctgcatgacagcttcgaatatgtactgccctcaaaacaagttatgaacaatttttgcttgccactcaatagttgctttgcagtacgagataaaaaaaatgctgtgatatctcaaattactgaaaaagcactgcatgtgattctctctggagaaaaaaaaagcgtatcagcaacgaatttagtatgtgattaactgcagcgagcatcatacgtagagtacaataacaacatgaaacagagtatttgacaatcaaagcaaataatgatatgtactcattaaagggctttaactagtgacaatcaaagcaaaaaaaagacactccagtgtgacataaataaaatatgacctcgcaaaaaaagaattaaaatgtatgaaaatcaagtataaaacttgttattttataagtagtatagatagcaccaacaaatatttagtatgaacattcaataacaaccttaaaccatttatttagtttttaaatttaagcatgtgagaaattattggtgttcggaattttaaaggtatgagcgaactttgttataaacactaaatatttataaccagagtgagcacaagagtacataaaaccaaacataggggtatttttaattatagcaactaaaaatcttctaaaattcctgctcggtcaaaccaaacacaattttgaattgagtttcaggaagtccaagcattgggatatttttaatttgagtattagactaaagtttaaataaaccaaacacatagtatgtatttcgatccgttgtcctcaataaaccaacttttgtatttttttctgattgggagcaatttcattcgattagtatttttagatacggcaccatttacgtgtatatgtgtcgtacatgcatacccaggccttaatttttagatttgctttctcgttttctcccaaattctgttggtgtgtcagacaaacatcctgtactactccctccgttctattttaaatgtaaatatgagtttccgtgttcaacttgatcgtccgtcttatttaaaaaatattataatcagtattttttatgagatgataaaaatcaatagtattttactcgtaacttatgttttaatttttttttaaaaaaaataagataaacaattaaaattagacgcagaaaacaatagttatatttaagatgggacgaatggagtatcatatatcctaggattgaggaatggtcatttataatttagaagcgctccacttatcacctcggctatgtaaactctactggagtagccgtaagcaggatacggttgcaatattattccaattacagtatattaaatatttggtcatatacctccgttagaattgaggatttttcctatgtcgtcaatgcgatcacaaagaggttatttgatcaaattttgtcgatagtaaacaatgtatttagtaaattttgtcattatcaaactgtgctcactgctcctgctctctctatatataatccgccgaggacgatgcaccggcagcagctagcgcgcggtacggtaggcaccagctatacagcgcgccacacacaacaatggccggcgctaccgctgccgccgtctcctcctccttcctcgcgctcgcgttgctctcgctctgcgccgcggccgctggcggctcgcctcagctggacgcggaggccgcgcggcagcaggaggccgaccgcgtgacgaggctgccggggcaacccgccgtgcggttcgcgcagtacgccgggtacgtgacggtgaacgagacgcacggccgcgcgctcttctactggttcttcgaggccaccgccgccgccgacaagaagcccctcgtcctctggctcaacggcggtacgtaatactagcactcgacacacaattaaccacttctaccaccaactgccatttgcctttgctccacaaaatttgtgtgcgcattaactcggtattaatcactccctctgtttcacaatttaagtcattctaacatttcttatatttatattgatgttaattacgaatgaagatagaatggcgatctcacttttttctaacggagtgttttaaggaaaattcgaagttccgaaatgttctaaaattatttttagtgcgaaattttgtgtgccaggtatctttaatattaaaaagtatgatacctttttaccttacgtaagagagaatttttttacttcttgagaaagtatctggaggtacgaagattttacagcaaattttatactaaaaagagtagtacgtctagtatctttttaaggatgataaaattaccctaagaacttaaaatcgctgggtgttaaaggttttctggagcacaaaaatgatactgggttttctataaaaatgttgctgggaatgatctaatcgactaatcctaagatgtgatcttctcgttacctctaaaactcaaactagacatttcttctttaatgttttgaagtatatatacattgatgatatcgtagtgattaagaggctcgggtagagatgacaatatcagtatgtgtgaattgtgacatgtcgtaagtgaatgcatgtttcaagtgtctatcatagtacaatcaccatgcccaactaaccaatcaattaatcagcatttcaagcgaaaagaggagccatctgctatcccatcaaatggttgtcctccagctagcataattcactattggcagtttcatggagtaatagtctgtatgctattataactaactcaagtgaagtacctactttagtcacatactcctactccctccatcttaaaatatataaaagattttggttggatgagacacatgataatattatgaatatggacagagagcctattcagattcgtaatactagaatatatcttattcacccaaaatctcttatattttagaacgaaaagagtacaccttaattgcgtagagtctctttcaatggctaatgtacagtcgacttatcacatttatttgaccaacttgcataacattgccaaacaatattcagccacacgcgtaacccagctccggccgtagctttgagccaggtacgccattgtcagtgatcaccggattcagaattggctattgctcacaaaaactggccagaatattcctgtgcaaattgaagcctacgtaacaaaaagaaatattagttagttagtctacaactcgtcgccttcaattggctgtgtatcttagttgcagaggctggtgatgtaattcatcttttttatcctttttttaaaaaaatgtaaattgtctcaaaaaatttattgtctaaaactcttcaaaaataaaattactatcagaaaatctgaaaagaaaatcattgtctgcaccataacggttcagatgctaaaactagtttaggaggccaaaaccgggcgttcccctgaacggcttccaaaaacctgtgattgaggcagcgttcgttctgggagattggagatagaatgcacatttttttccgcgtcacgcttcttaaactattaaacggtgtattttttataaaaattttctataggaaagttgctttaaaaaattatattagtccatttttgaaattgaaataattaatactcaattaatcatgcactaatagctcacctcgttttacgtatcttcccaatcttctctatctcctctttctcaaactcagcctgaaaccctccaatgttcactctatccgaatgaatctcatccaacagcgcatattgtaattattcgttgcatatgtcaacatctcatctccgtgtttctctttagaaaaaaatcagaacgagagtaacaaaacacaactagaggacacatacatatgtagctgctctgaggcgccgtcccagtcgaaagcgccggagacgaagagttggaaaattgaagggttggaaagtaactagctagtttgttctctttaggagaaagtttgcacggtccagagtataatttgtggtgcctcagttttttgctatatgagataagttaatctactagatagagaaggcaggattaagttttgaattgagttcagtgtttgtcccagttcaattatactacagaccgagccccattcacctccaatttgaaaaattagccaaatacacgttcaagttagcacagaacaagtctgacgaggtccaccactgtcactgtggcctgctcatcctcacgaacgtaccggtgaatccatccgcttgatcgatgagctagctcgctagccagacggatttgctgtccagccaagagcatatcgtactctcctagcagctggtccaagacaagccgcccggggaccccccacgatatggactgcatgaatacccccgttcgatcgagaaggatgggcgcgatccatgcgagctagctgcagcagcagctagagaacgaaatgctgctggatttctgcatttggactggttgctggtagcaaccagagggatagccaatcctgcttggcatggtcaacacgagccaggctagcagctagcttgctccgggaacaaagggagatccacgcagccaatggggcctcgcgggtgtccgtttcccggcgataagctgatcttccggcacaattcacatcctcatcgggatctgaattaagccgcgcggtttttgccagcatctgaagcaaagtggcagaggtggtctgggggcttatatcattttgcttgcttgcatcagttgagttttttggttgcactcaatcagaaggcgtcgaagcatctgtgatatgtcagtcagaacctagtaacgttgaaaattctatgtagttatggttgttagttgggatttgttaggaaagaacaattacacaccatccgacaaagtccgattagtggttaggagagacacttactgttcttgcgctctcttcttcttgttgttgttgttcttttttttaaaggaaacttggccctgttgtgtgcagtattaacctattatttaatatttttagaggagaccaaaacaagcttgtttaggtcttgttttaggaatttatggtagctacggtttctttcaaaactaaaacttttcataaatagtctaatttttatctaggttttaaaaatatgtagttatataatttagaaaataaatagatagaatttatagcttttctagattctcaccagctaaatttttttaccaattacttcttaaaattctaaaggtcaacaaagaggttggctgtgtttagaggtgaaggttggggcaacctccatctcttcgcacgtaatatgaaacgatccattagcgtataataattaaggattagttaaaacaaacttaacaaatgaattaacgtaatttttttaaataacttttctacagaaaatatttttaaaaatgtacatatagtttggaaacgtacacgtgaaaaacgaacaaccgtcagctgttggtgccgccgattcccttttacccacatatatagctcagagcaagcttccagagactaaaagagtaaaagggtagaaaagttcactcgtcgtcgccttctgtttctgcctatatggaagttggaaccgcactacgcgtacgtacccatcgacccggaaaggcatacggagcacgactgcacgggggtgctcgctagcgcacggccgcacgcacgcacgcacgcaccgtatcaccaacggtccacgtagtatcatgtacatggagacaagaaacaaagcgggtcggtcggtatggcgccgctttcacgcgcgaccgaggaggacggacgcgcacaccgggccaccggccaccaatcatcgctacttctatagcgagcagtggcgcgctgaggcggaggcgtacgctactacacaccgctggccactgctgcatgctacacgggcggggaccagctaagcaaaagcatgcgccaccaccggccgcgcgtcgtgacacggccaccacctcgcgtgcccgatcgagcccaacccgcgggcgcgccccaccacggaacggatcgaagctactactgccgctgcctgccttccctgcctgccttgccggccggggaaaatatctgaaacgacggtacgcgagcgcccacgggggccacggctgtgcgcgcctgtgccggtggcccggtgctggatctcaccgggcgcgcgcgtggctgcgtactgtgccgcgcgcggagtcacccatgcacgccgtgaactggtcgaatgagatggatcacgttcacgtgcaggcaggcaggacgccggaaagggatcgggagcgcgaaagtgagctgtgtctaagctcggtttctcgttagaaatgcgcgaataattcggtccattagctaagctagctggctgctgctgcttccgctgtggtgtggcctatgactggatggcgacccgtgccgtgtcgtactcgtgctcgtgatcgcgtcgttgtctctcgcgcgggatggacacgactgatctactggtctctgcaacgttttaacggtcgacgttcaccatgcatgtgaagtttcttttttttttctctcttttcgttcgtgattatgagctagtagcttaaaaaccctgtgtgtaattcttcgtcaggagtgtgtactgagtgtttgagttaggatgacaaatgttgctgtttttgctgcagggcctgggtgttcgtctgttgggtatggagaagcggaggagctcggtccattcttggtgcagaagggcaagccggagctaaaatggaacaagtactcgtggaacaaaggcacgtactgcttgttcatgccaaaccctgcattctgttagtctgtcactgactcctcgcaatgaacaggggttcagagtttttttttttggcacaactgaatgttcactgttaaaaatctgcagaggccaatctgatgttcctggagtcccctgtgggtgtcggcttctcatacactaacacaagctccgatctgcagcagcttggcgacaagatcaccggtaaattaacctctacatcaacaacagaatactctgataaaaaaaaggggtcaattttggatgatccaaacagtatctgaactcggattgccatgcacgcagctgatgatgcttacatcttcctgctcaactggttcaagcgcttccctcagtacaaatctcacgacttctacatcgctggagagagctacgctggtaactgaactgatacacatacacacttcagcatctagcttctgaaaaaatcgtgatgcgagctcattattcccggattgcgttattgtcagggcattacgttccacagctttcggagaagattttcgacggcaacaagcaaggccccaaggagaactacatcaacttcaagggtttcatggtagctacacaattctgcctcgaactaatactgatctcatacaattttatttcttcgatcacgtcgtctcattactctgacgcagatagggaatgccctgatggacgacgagacggaccagacgggcatgatcgactacgcctgggaccacgccgtcatctcggaccgggtgtacgccgacgtcaagaagtactgcaacttcagcatggagaacgtgaccgacgcgtgcgacagcgcgctcaccgagtacttcgccgtgtaccgcctcatcgacatgtacagcctctacacccccgtctgcaccgaggtctcgtcgtcggcggcgttcggccagcgccaggtcgccgtccacggcgccgccccaaaaatcttctccaaatacgtgcgtaggcaactcatcggcacacagaacgatcacattttttcagagagaagaaacaacatgatttttttttggtgtcattttgtaacagcatgggtggtacatgaggccggcggggtacgatccgtgcacgtcggatcacgccgaggtgtacttcaaccgggctgacgtgcaggaggcgctgcacgccaacgtgaccaatatcggctacaactggacgcactgcaggtgcaaacaataagcgtttgcaacctctgttctcttttgagtctttgaagctttgagttgacagaatcgttttgtgacggtgtgtttgttgcagcgacgtgatcggcaagtggagagatgctcccttctcgactctccccatcatccgtaagctcgtcgccggcggcatcagggtctgggttttcaggtgaaaaaaacatccttgtagtatacttcagcatgtctgaacaacgtgtacacagcaatagatgcatggcgtttgaattgagctgacaatgagtttcactgggtgcagcggtgacaccgatggaaggatccccgtgacgtcgacgaggctcaccctgaacaagcttgggctgaagacggtgcaggagtggacgccgtggtacgaccatcagcaggtaattaaaccatcctacaacaaagaaatattcagaaacaggtcgttgtgagcatcaaactgaaccatttatgcaggttggaggatggacgatcctctacgagggcctgacgttcgtgacgatccgcggcgccgggcacgaggttcccctgcacgcgccgaggcaggcgctcagcctcttcagccacttcttggctgacaagaagatgcctccgacggcgttcccctagtcgctcgcatgcagtctgccttcttcaacgatggcgaggaacgggcgtcgtgcgcccactaggttgttttccagcgataccaactgatcaggaaattttcttttctttggtccaagactccaagtcatgtaacacagtggaaattcgattggaacaatcgataacaataaaatcatatatagtgttgattgatttcgatgctcgcaatacaacaacgggtgatctgtatgtgtgcggcgttaattaaactgaacaccagcaaatatgaaaggaattctcggcgtgacagcatcatagaagattagagtagtgcggctctaacctggcgttttataggagccgtatggcgatttcagaaacatacaggacaagtattcttcttttatccggacaggaaaaagaggagaagtaattgaacaatggacagtgcattagaagtaccgaacccagttatatttatgacatcatatagaccaagcattacaatgcatgtttttcttctcttcactccagggcatacatccataagagtgaggtaagaaaataagtaccagatgttcacatggtgacagtaagagttacacttaacagagcaaatcacatgaatcagccatgccttcgcttggcgcatatttccttttgcaccctggagttaacctttctttggcatggcagccaacctagtatacattcttgccatggattgatagcctctgatgtcgcctgagcgcaggaggttgcctatatttacggaagaaaattagcagaaactaagataaggattaaaatatcacagcaggcctcttttcaaacaaccaagtaaaaagtatgaaaaagtaatttaaaccgctatataatcaatcagaaatcggacttgcaaaatgcttgaagcgacaaactgtatatgatcatcagatgatgaaattacacaagagctccctaagttatcaaatacagtaattcataattttgacctatgataatcatattttggatgcaatgtgaccaaagtgccatctgaaaaaatctcaaacataaaccgtgaggcggtgaatgggaccaatacaaatttactgggaaaattacattctaattcataatgaggaactatacaatataagtgacactgcacatcttagctcattagtataaatgctaataaccaacaatgaaatatttacaaggcaattattcaatccatattgcgtaaaatggatcagcaggaatggtttctctgaccgcctcaaaattaaatattgtaactacataaatcagtttcttctgttgtgtgcggaagattaggacatgtggatgatgaggcttcccaggagagtaggcggcatggaactatgaggcataaaaagaatgaggacaaggaacttgaaactcgcgatgatgtagcaaacaccttttaatggcccttacaagttggactctaactgggaagagataacaattggaaagatatactatttcaatgtaacgaactaatctaatcagcatcccaagcacacccgccacccgaggtggactcagcctcgtcctgggactcattggccctcgcctaggacaacggtgatactggagtctgaccatatcaattatcacgtaattcctttggttatatagaggggctccattagagtaaatagccaagtttttctccatattttttaactggctaatgtaccatgtgacaataattagaaccaaatattttcatgtctcaaactactccaaaaagatcacatcatggagtggttgaggcctcgaagatggaaatcttcatgcaccatagcttgattcagtgagagcatgaacatctattactttcacattacaaaataatggctgaactatatgtggcagaattagtaggaaggtggagctacctgagtcacagttaagtggactgtctggttcaggatgggccatcaatgcaattatggctctacaaacggattgtagtgtccatgctgggctccacgcattcttcaagatatccaggcaaatctcacctgtctggaaacacaaacaaggtaaaaagaatgataactgaaattactccttcaattctgttaattcagatgtaacaatatagaagcgacttgacaaaaacaataacaggaagagcacagttgagtctacacagtaaattctgtcatgttagtacattcagattgttacaggaaaacctgataaaatgaagaagatgacagcaacttcatatttacattctcaccaacacttgaaagagacaaatgccttcaaataggtcaaatttcctaaagtaaaatgtacgcagagaaggcaatgcagaagtaaccttgaaatgcacattcgggtggaaaattttggtcaagaagcgaacttgcggaggaaggagagggtattgctcaggaatagagaatgcaagttgaaatacaccaccttcaaaaggtgtctccgaagggccctaacaacatatacaatcagaaaaggcattagttaaaaacttatattgctgtttctagcatcaccttgcaagttgcaatataaaaaccaccttgataagagcagtccacttgaatatgtttgaatcatcgcagattaactggatatctggatcagctgacttttctcgctgcacctccttatactccttaaagagcctagctctagatgcctttcgatagaaaatattttgaagacattcagatagcatgttaggaaccaaactaaaggagcaattcacatacttcctccgtttcacaatgtaagtcattctagcatttcccacattcatattaatgttaatgaatctagatagatagatatgcctagattcattaacatcaatataaatgtgggaaatgctagaatgacttatattgtgaaacggagggagtagtagttaagctcattccagttaacaataatactgaaagtctcttggacatgatcttccaaacatttataagttttattgtagtgaagtaaatcaagttatataattgagccattagtaaaagtaagggatgtacacaaacttttgctagtgtatgacgacaagaaagtatgggtgtacaaaaaccagtactggtcacattggtaaccgtcggcaaagctctccaactaccgagtgccaactcttccatgcaaacacgcgagccctatactaggcgccaaaccgtttactaaaggaaaagatgagtacagttattgctgccaaatgtggattgtcctattaaatgttaccaccttagcatggacgtctcagtgagaccagtaaaacataacccgaataattagttgattaagagttggccatcacattacatacctaactaactatacaagaaatgtgcaaccaaagatgaattagaactgacctgcatctggtctcctctctactgttgactgatatgacaaagtgtttctgtcaaaatgtaaccaagagcataaatagaaaaagttagaacggtttgattgaggaaccttgattagctaaattgaaataatcatcattcacaactgaaaagctaaacagatagtaatcgtaattccctgtccgctccatcaataaattcataacagactcaatttctagttatcgcaaacccaatctggttctctaaatgtaataatagcctaatccaatgtcttcgagatacattccctgcgatacaccatccatacgttaaagctgctgtgtgctgtctacatgtagagcgctctaaatataataaacgaaaccccgtgtatacactactaatccaaatggttcctaccccccatctcccccaatctggagattttgccgacggggatcatggcagcagtcggcgagccgcactgccctccgggctcccgataacccaacaactcccggaaggcactgggcctccgaccatggcttccaccgcaaatccacaccagatatcagcttcgagagtctaatacaacaattccccccacccggcagccatcgctttcctcaacgccgccaaatccctagccgatctacccatgaacgacacatcacggatacatcggaatatcgcggtggcaagggaagaaatcaagcgtacgtaccagctcgcagctcccctccccggagctcgatcccggcgtggggaaagtcgcgtcgtcagagggactcggaccggacaggaggacgaacgggaagacgcgcagccgttggcccgtggggaagaagttatgaggaggaagacgacgtgacggggaggtgggtgagtcatgggctgacccaataacagatgggccagatttccggcccaagacccaccaccttcttgcggagcaatccatccatccagtctctttctctctctcctcttcttccttggcgagttgtgctctgcctccctctcccttcccacgccgtctcgccgcaatcgctcgctcggtcgcctcctcttccgccgcgagacacgaagagcagcagctcacaggtaggcctgcgcgtcggcggccatgggagacagccagtactccttctccctcaccaccttcaggtatgtgctgccttgcgcctccctcgcccggagatcgggcgtgatctggtgcggtttcggtttcgtcatctgtggtttttgtggcgatttcgtttgcagcccgtcggggaagctggtgcagatcgagcacgcgctcaccgcggtcggatccggccagacgtccctcgggatcaaaggtgcgtcccgtgaagcaatcccttctctatacttctattgcgttatgagaatcgagaaggggaggggaggtttgagattttggctggttcggttcacatgacgaagtggcgcttgttggggattttgcacttttcgcataactttaggtcgttgcagagcttttatttgttctggagacctggagtgtgaagtttgctacggcttaggttactaataggtgccatgttacttgcatctgctattctgctttagtgatacttgggaattttgtaatgtttgcttcgttttcgcttacaaatgcttgtggattccatggaaaatcattattaatctacataaatgtatgtcttgtaacagcaatggcaagtgctcccctttataaccacataagaaatacaagctgcttggtttcatctgtgatgatgaagttttctatgccaatttacggcgttgaatgtatatgctgacctagttttcccattagtagttgtatgtgtgtgcagtctgatctagtgcctattagggtttggaagcccattttagtatcagtgcaaaattctaatttgtttgccctgtcaacgtccaccttactggtaggtttacatacccttaaaatcagcttttgttgccacttgtcagtatttatgcaatttaaagtcttggggttttagcccatgaattttgttttggtgtatgaaaaattgaaagaaactatttgacatgcgttcttcacgctgatagatgtaattgttgtatgtaataaatttgtggtgtagaacatactgcatatgtttttaccagattgttctatcatatgtttttgtgtagttactgctcagagactacagtctgttgattctcttcagttcccttttagcctagtttattgattctgaggtatatttgttatgtttgcagctgctaatggtgtagttatcgccactgagaagaaattgccttctattttagtcgatgaaacatctgtaagtctaacatcactcttaatgctgaattcctcttttagtgagttgcgacatgctattcgttgtttgtttctcagaagcactaatacatagttatatgcaaattcaggtgcaaaagattcagtcattgactccgaacattggagttgtctacaggtaaccttttacattggcttcattgttggaatacatttctattttgtatatattatggttgtcatgtacatgctattgtgagttattccaacttgttattctattagttatgttcttgatcctttatatgagcactagctgtgctgtaagcttctacaattttagcagtacatagttcacagatgagctattgtgtaagaatataatggtaatataaataattggtttgaaccgcctggttttagtgaacaagtgacacagttcgccctgagaaatttgcacatattaatcttccctaaaaaggcacaaattaaaaatatctatcttgctctccaaactttgcaagaggataagtgcattggtattttactgtgtcttatagttatatgcacatcagattgcagtaactttggaaatccatatctagacatttgaggcaacttggtgaatgagcatgcagatctctggatttttgttgattagcttgtaaggtatttatagtttatctattcactggactaaagcataaaaaatagttcttcaatccatctgcagccttgtacagtggtctgagagaacagctgcattctgtctttaaattatttgttagtttgttacatctctcagcttgctgctgttaatatcagttgcaattcaataatacatgtttacttacctgtgcacttctttcagtgggatgggtcccgatttccgtgttcttgtgagaaaaagtcggaaacaagcacagcagtattatcggttgtacaaggtggttttttacagttcatttgatttatacttcagataactattgtatgttttgtaaagacatatatttttcaataaattgctatttcggatagcatgcaatttttcatgtacgacagtcatgatcttttccatcatttacttatttctcatgattgttcttcctttttctaatgcaggaaactatccctgttactcagcttgtccgagaaactgctgctgttatgcaggagttcacacagtctgggtatgctacttcagagttttccatttctatcaatgatattgttaaataatatattcttgcacttgttcgacctaattaatttgtatggatatatttgtgggatatttttactataacttaacagtaccattcattcaatattgtattcgataattcagatgttcagtaccgaaaactttcaacatgtacatcacattgatgtgtgttgatgcagaagcttgttaattgacctgctgggaagaatatatatgatctgctgtgtgaacttccacttggattttcactggatggataaaattttattgaaattgggccattgagaattaaattgctaatgtaaccaagcaagttgggtagtttcatacctgtaacacataggattttccagtcatttgcattttataattcactttgacatcattgaaacaaaaaagaaaaaaaaacatcagaggaataattaagacatacatcttgttataaatcacattacatgctatgtggtagttggttcttatgttgattggtgaatcctgaagtacagttcactccttaaagatatgaatatatgatgtaaccgaatttctgaggcatgactcacggccaacttgtttgttgcagtggtgtaagaccatttggagtatcattattgattgccgggtacgatgacaatggcccacagctgtatcaggtatgcagatagctgcgtgataggggctcttttttgttgcaactgtttcaaaattaatgtgtacgttgacccttgtctcaataataagctgcaaagtgttgtttgcacaaagcatctaatagcagatcaccactattagttgtgctagttttgttcttctggactgaaattttacctgtcaatttgtcatattttgttatggtgtaaaattggtataatgccagatgtgctgtattatttctacaggttgatccctcaggatcatacttctcctggaaagcatcagctatggggaaaaatgtctccaatgcaaagacatttcttgaaaaaaggtacatagcataccactaatattgtattgtactacactctgttttcctcaatctgatcagaaataaagtggatttgtttacgaggatatcttctttccaaagttgtatgactgcacttgtactgttgttcaacctctttatgtcctcatttcagatacacagaagacatggagcttgatgatgccatccatactgccattttgactctgaaagaagggtatgtcttgtaggtgcttctgtttctatttccggaacatccttactgagttactgactgattcgggggttgcagatatgagggtcaaatctcagccaacaatattgaaattggagttattcgatctgaccgtgaattcaagtatgtcatacagacttgatcaagctgttttttactgccacgtatatgcaatgcaacttctgtcttgtgaacatgccataacaagttactgacaagttactttctgtacaaaatgcagagttctaaccccggcagagatcaaggatttcttggaagaggtggagtaaattgtctgttgacatttgatagtttactgttctaagtgacactcttgagccgtagtcatgaggcttcttgtctcttaccatttgtcacttaaacctattgtaaactgatttgcttcagtgatatgcatgagatgaagtggtggacctacttttgaatccccatcgtaaacaagatattgttgggtgaatgttgtatttggttctcttctaaggaggtatttggcgcatatattgtgtctcctcccgacatatcatttgccctgacagtacttgtgaaacagtcaaaacagatcacgaaggaatatcttggttgagtttgcatccgtaaaacatgtgcatgtctgcgttactgcgtagatgcaaaataatatgagctgttaaaacatatacaggaaatagctcaggccccatcgtagtttcctctgtacagcatttcaaatttcaaattttaaaatttgattttaaagtttttcatagaggtttatttttttacattagcatttatgccactaagaacacgtatccataaattattattattttgttaatatgtcgtattatctgaatttagctaaacgatgggtagaatttctttaacgtgtactctagtatttctttaaaaaattcggtgtaagggtataaaggctgatgtgtgagtgtgcatgtatacatgtgcaaacttctcccctggcccctactccctccgtcccaaaaaaaaggcaaactgtgggtttccgtgccaacgtttgaccgtccgtcttatttgaaaaaattataaaaaaaattaaaaagataagtcacgcataaagcattaatcatgttttatcatctaacaacaatgaaaatactaattataaaaatttttcatataagatagacagttaaacgttggcacggaaacccacggtttatcttttttttgggatggagggaatatactataagcaaatggttatcactccactgaaaaaatacagataaaaatctcctgtaaagtatggaaaatatacagagttaaaatctcctatatgctaataattataaagtatacaaaattaaaagaaattgttagtcaagaaacatacgtaggtggaggatcgaaagagcagccggtactcgggtcgtccactcgtcctcttccaatcagtcgcggctgccgccgccgccgccgtcgccgtcgcattcaccttttacaatccggtccccccaccaaaaacactcctcgcggatggggttgtgctccccgtccactcctcgtcagctcctctccaccgtcgctctcttcgccttcggcgcaggcctcctcgcctacggcgtccacctctcctacgcccacgtcgagccccagcgggcgcgcacgctcgcccgcgaccagttcgtccgcgattacctcaaaaggaagtacgacaagtagcacacggcctccccccctccccccaacgagatccccttcccgctcaatttcttgggaggggtgggggagcgatggctttggcccccgcgagctcgggcagtgggccggtggttacggaggtggagatgaacgccggcgccgaccagggtgccaccggcaccgtgcgtgccaccgtcgtgcaggcctgcaccgtgttctacgacacccctgcgactctcggtgcgttctgccatcttcgtttatgctgttgctgctgctgctgctgcagctagtatcacccgcgaggtgttcgattgtttgtctcgcccgtgtggctgtttggattaggtggtgcgcgcaaggtgcttgcttatttgtctcgcccgcacagcgacactaatttacccacacgcaaaacaccgggagtgaactgaaactgggcaggaagtaggatatctccgtgtgcgccaatatttttatttttagaaataaggtcttacgacccggcttatattgaaagccaaacggctgtcttactggggttacctatccaatccctccctctagtggattaaccgaacatggccttaatgaggtaattaatgatttatctgcaatgatcctatctacctaatctagtggagaatgaaacaagtaaatagttcaatggaattaaaactgtaaatgtatgatcatatgacatgttactttttatgaataaaatcctaaataaacggggtaacgatattatgctaatttctttaactgctttgcactgcagataaagcagagaaactggtagctgaagcagctggatatggttcacagatagttctatttccagaagtctttgttggtggttaccctcatggatctacctttggactgactattggcaatcgatctgccaagggaaaggaagacttccataaatatcatgcagctgctatagatgtgcctggtattctgaaatagtttagtaattaatatatcgttgtcgtacgctatgtttatcgagtgtttccaaaccaaggtcttttgctttatcattttcattttttttttaaagttcagtgctttattttatttaggttatcaatctattagaaaagacactgctattatctaaaaaaaaaagaaaatacactgctaaatgtgaagtataaaccctgaaatatcaatttcaaccatgttccctaaattgtgaaaggtaaaacagaaaaaaaaatgataaggagacctaactcgtgatgcagatcccaagctgataatcatatatgatagctatgcattaatgaataaaagcattagtaaccgcccttttttttttctgtagtaatgttcagaattcgtgttgatcatatccatcttaactttttttttccgtcaattaattcagttaaaatacgtcttacatcattttttagctattctccggttctccccacttaatatctagctttccttgctacagaggatatgcactatgcagtgcccctgcaagacattttaccgacttctgttgaatgcaggtccagaggtgacccgcttagctgcattggctggaaaatacaagattttcttggtgatgggggtggttgaaagggtagggtacacactatataatacagtgctcttctttgatcctctggggaaatacctcgggaaacaccgcaaggtcatgcctactggactggaacgagtgttttgggggtttggggatggatctactatacctgtttatgatactccaatagggaagattggtgccgtcatttgctgggaaaacagaatgccacttctcaggacagcaatgtacgctaaaggtattcctagttctagcaatatgatatgtttctcgacctgagcaagtactctgggttaaagttatatcgattggtaatgcaaagaagttaagagttaagacaccacaaaagggatactagggttgttcatttgttagacactactaccttgaaaaaaaaaaggagaaatgtactttgagtgactctgaagatgcaccatgtatcatgtgcttgagtttatattttacctgaagtatcttctacattcatgcaggtgttcagatatactgtgctccaactgctgatttctcgcctagttggcaggcctccatgacgcatattgccgttgaagggggatgctttgtactttctgcaaaccagttttgtcgcagaaagaactatccaccagcgcctgaatatacttttggtggccttgatgaagagccatccccagaatctgttatttggcctggaggaagttccatcgtctcaccatctggaacagttctggcaggtccaaactatgaaggcgagggcctcctcacagctgacttgggtaagaaacgtggaaccttcaagtaaattccatgctcacttgttgactactacatcccagcccttttttcatatgtagtagcagttggtgtagatgtatccagctgtatttgtgcaattatttctacagatatcagattataaccctctgcccaaagaacagtattgtaaccgtgaaacaccacaagaacactaaagagaaattgcatggtatgttttgcagaccttggagaaattgctcgagctaagtttgatttcgacgtcgtgggacactatgcacgacccgaggtgctgagcctgaccgtgaaaaccgaatcaaagctgcccgtttcttttacttctgctgcagagaaaaattctgctgcaaagagtgacggtatctctaggacctgatggccattaatcttccatcgcggtgtgcaataaaattgtcagctggccagtgttggtatcacatgaataatctgtctttagtttcttgtaaagatttggagacgatgcttccctgataaacaattggtgcctatagtgctgtaatactcgtctgaaaatcgtgtcatgtttcttcctcttattcgttagtgaagacgtcccaactcccaaatgtagattgcgataacacagtactcagtattcaatttccaacaaatcatacagtattctacattccatttctaccatcagtttcgctgtggctaacaattgttccaaatcttataatacgaattccatgcaaaaaattgaaagaacaatgtgctacgtggcaacaccggtttcgcgggacggcttgatcctgtttgcgcacgtgcagcgtgaaacgctcgtgtgcgtgcgtgcagcggttgtccagaaggtcgtccagaagtttctattgatcgagctattgattgagcaattaggggcctatttggattgctaccaaaaacatgcactaccaatattttggtaatttgaatagtaattgtgtttgatttggattgaagcctattcattggtaatacctaatctagatttggcgtcatctagaacattcttcactaaaatttcacattttaactctatattggtagcaaaccaaatatgatcaagtacaattttaccttaccaaagttttggtagtgccaaaacttgtctacattttggcactaccaaaaaattggtaaggcaacaatccaaataggccctaggtccatgggagcacagcaggctatgtgatttctcgcgttgctgctgtacggctggcaaagctcaggcagctattgcttcctcctaccaccggatattgaggattaaagaagtaatgatacatacttggttagagactaaaagaggattaacaggatgtaatcaaatcacccactaaaatttctacgttgcaaacatccatccttttacaattattgtgtttccttattttgtatccgtattcatgtgatttatattatttctttcctgtgtttttctctatggaaattatataaccttttctctttggggcaatttcattcttacccctactttaatgtttaatattgatgttgcccagtattttagggttttgtttttgcccatggttttttgaaataaagataaatttagcccctacttttgatggacagattaacgatgttaaatctttagcgagaaggcattcaatacccttactcatgttgcaaacttcccctgtttttgttcatgattgagaatttgcccacatttagcacatgaaccttgcaaattcgataaacttttactaatatgataattttaacataaatatcaacaaaaatttgcttcaaaatttgacatcttgaaaaaaacaaatagacaagtcaagcaaatctattgcctacctgtgccaagctgtcgtcgtcgcctcctctcacaaaccgccgccaccgttgttgcctcctcttcccaccgagccgccgccacctcctccccacgtcgagccgccaccatcacctccccgcgctaagctgccactgtcgcctcctcctttcatcgagccaccaccgccgtcgttgacctgttgtcctcctccccgtcgcctcctcgacacgtcgagcagccgcacctcctccctacgctgatctacagcagccgccattgtcctcctctctaccatggcctcttgtgcaatgcctagcctcctcctacacactgcaactgggttgggtggcctgcacttgctcgagttgtccccgttgcctggccggcccacggacactgccgccactgtttcacaacggggattcgggttcaggaagggaagagttgatgccaagtgcccaagcctggagggacaccaagcggtacttggatattttataggggtaaaagggtcaatcaataatttaaaaaatcgttatctctttctttctctaattctttaccgcactaagtccaatcccactcacttccatcaaaaacaggggtaaacgcctcattcattgaaaaaaatagggcaaaaaacaacaaccctaaaatgtagggtaaaatcggtattggatatcaaagtaggggtacaattgtacaaacaaaattgtccctttctcgtttctccctcggtccaatgcaacctatatatgtcttgtgagggctaatttgaaacaaagattgagggatgaataggaaaaacatagaattctgacaaaaaaatcaagcgcaaaacaaataattataaaacacataaaaaatatatgaaataatcatttgattggaccatacgaaaaatgcaagaattagatgagagagataaactcataagagacttcgcatgatattgaacctcatgttaaaaatactccaaaacttgtatgaatttgggcattccttagaaatttgataagactcaatagttttcaataatcctttggttcaaagaatcatatagagaaatttcctatagcaaagtttattgtttctatacagaataaaagttcctatatttttctatatttttctttcaagtaaaggggccctaattagttactccactgaagtcgaatgagctgggttcactttaccatgcgtgggtttttcttgtccgtcttagttcaaaacggccactacaacttgttcagtaatcttggtgaaataatctctcctactcctagtccagtttttatgcactaatgaatttctctattttcgtagtattccataccaagaacaatacagatataaaaacttgactaaattgcactttagtccaccttttattacccaagtttcaatttggaccacccttaaacctatcttttcaatttggaccgggtaaatttaccattgttgcggtttggactactataaacaacttttctcgtcatgactaacttccctttcggcaaacatatgaaccatatatagaggagatcggccgtatactaaagctgatgtgtttaaggtcgttgattgcacgagaaaaaaaatcgttcatggtggttcaaattgcaacaatggcaaatttatccggtccaaagtgaaaagatatgtttaggtaataaaatgtggtctaaagcgtaattcactcaaacttgagaaactttatttgtaaattatttttttcttcgttcacgtgccaaagaagagagggaaagaggaaacgggaaagttacagccatggaaaaaggctggagaaggtgtagggtctagaagcatccgtgatggatttcgctccctcgtcttctgctcctagtcacacttgacagttcagcttcagctcctcccccaccatctccctcctcgccgccggcccccatttctcccgcgtccacttcgagcggcggcgcgcgtgccgtaccgatggctatggtcccctcgggctcgggcggtgggccgccggtgattgcggaggtggagatgaacggcggcgccgactcgggcgccgccacggtcagggccaccgtcgtgcaggcctccaccgtgttctacgacaccccggccactctaggtaagcacagcacacgtacgctcaacgctcgtgtgtgcccccccttgctttggtgaattttcttttgttgttgttggtagataaaataagtcagaaatcaccaatgtgctgcagctagtggttattaattaagagggttcagtgtgagatttggtataggtgtcatttgttggtaatgagtaagcaatatgcgcagaattggaggtaattgttggatgtcctttgtcatttgaggtgaaatcatgataggttacatctatcagattttatttcttgtggtttgttcacggtccttgtgagctcttactttgattttactttgttaattgttatatgatttttgctttgccaattgtcatgattgccgtatgttataccccatcttgtaaattatgcatttacctaactaatggtcgccacaattttttgttctgtgcgtgttatctgtaggaaaatttttgttagtagtatttgctatatttaaatcatgccactgaaagattttgcagcaagggctggcccagtattcaactgaggagctttcttcaagagtttaatttgttattgagccttatttagtacctttggatattaaacaaagctgttgagcctttggaaattttacaaatggtgagcacatttgtatcacaggttttgggcagaatgcacattttcttattctgctaaaataacccactgattatatgacccagtgaaatgatctattctgccaggccagacaaaatgttaaaactctattatatgctattttctgttgcagcatgctgcatcatgggctcgtgtgatcatgtattcatgtccaagtgcctatccttttgcactatggcactacctcctccaatcactgccattgcctaggaaagacacataatgcatattatttttctactttatgcatgtaaacattaaggccaatactgacactttgggagaaccagatcgatgcattgcattagaaacgattgtttattattcacattgctattcatactgcagataaagcagagaggttgatagaggaggctgctgggtatggttcacagttggttgtgttcccagaagcttttgttggcggctatcctcgtggatccacatttggctttggggccaacataagcattggtaatccaaaagacaaggggaaggaagaattccggaagtatcatgcggcggcaatagaagtgcctggtaagtggtaatgtaatggaatatatcaattcacttaaaatcccgggccacccatggggaacgggctaggattgatccctgccaaacaaagtgttctttgctattgacttatccgttcatgcccttttatcatcaaaaagaaatatatatatatatatatatatatatatatatatatgtgtgtgttgattgtttaaattgcatatttctgtcaacactgtgtttgctgaatactctatccatacaaaaaagtaaggcatatttcttttgtcaccaagaccaaggaggaattcactcatcccccatgtaacaaaaccaaggaactatatgcatacatgcaacctataagtattaagatggctattcggattctggtcaacaattaatttagcatatggagactacaaatatgaccatctcttttggaaaaaccaaaaaaatagtatatgcctaacacttttggatggagggagtactagaaatatccatctcatattagactctggagaactttttaggggaaagaagtcatagatgttaccaaagatctatccaattacttaatctgatgtaaaaaaaaaaaagaccatagctttggtaattgttcaagtaaggcataggatttccccaaaatggagaaacatctacaatggattattgatactcatacttgcctcgactgcttcagctagatgttatgatcatgctttctggttccaggcatggattgattgttgtcaaatcaataaccccatatcctgtgctgttttgtatgctttttattgtgttttatcataagaaaacagattttgtgttttatcataaaaattcagctttctagctgtttcatcactgtggacatacattttgtttcttctagattgatatatccatcttctgacttacaggcccagaggtgacacgcttggctgctatggctggaaaatataaagtatttttagtgatgggagtgattgaaagggaaggttacactctgtattgctcggtgctcttctttgatcctctaggacggtacctaggtaagcaccgaaagctcatgccaacagcattagaacgaataatatggggatttggagatggatcaacaattcctgtttatgatactccacttggaaagatcggagccctaatttgctgggaaaataaaatgccactgttgcggacagcactttatggtaaaggtaagactatttcttggaatattgttactacaataccactagaagtcttcatagttcatacagcttatgaggaagtgacatggtttcatgagatgatattcctgaaataacaaaatgaatttggtttcagaataagtcagataggcaaatgtgaaaaaaaataaaaacgctggtgtggcagtggcacttgaatttcttcatcatctactcatatattgtatgcactacacaggtattgagatatattgtgctccaactgctgattccagacaagtttggcaagcctccatgactcatattgccttagaggggggatgctttgtcctgtcagcaaatcaattctgccgtagaaaggactatcctccaccaccggagtatgtattttctggtttaggtgaagagccttctccagacactgttgtctgccctggaggtagcgtcatcatttcaccatccggagaagtcttggcaggtcccaactacgaaggggaggcgctgattacagctgatctaggtgagaaaataattgcatatgtactaggtttttcgtacatgcatttgccccaattttgtttatgtgctccctcagttttctggcaccaaattttgaatagttgtgattagacaattcatattaaaatttgtaatgaaattcattcgcagaccttggagaaatcgtgcgagccaagtttgattttgatgtggtgggccactatgctcgacctgaggtcttgagcttggtagtgaatgaccagccgcacctccctgtgtctttcacttctgccgctgagaagacgacagccgcaaaaagtgacagcactgcaaagccctactaagcaagataatcagagtcaatcgcaaaactgattactgtcactagacggtgaatcattggctccgatcgttcatgcttgacgtccctgtcatccccttgcttgtaaattgcagtccagaacaaacttctgaggtctgtagaacttgccccttttatgctgtgtatctatcaaggtaggtgtcagatcaaacttggttcccctccatatcaaatatgagtagtgcatgaactggcactacgatggtttcactgtcacacatgtggttattttacgttctactcccttggtgccatattacagattattttagttttatcataagttaaacttctctaactttggctgaggatatagaaaattgctacaataatacataaatgcactatcaagatatatttcatggtggatttaatgaaactaatttgatgttgtagatgatgattcttttataaacttggtcacttaggataaaactaaaatgacttatggaacaaagggaatactccaaaagaaaaggcacgagttcagaggaagcattctgctttgccaaatgttgctttggctttttggtaacgatatcggaaacctcaatgcctgcgaccagtttgattagaagctagatttagagcaggtataatagcaggctataagctagctataaacatattttaagaagataaaggaagagagaagagcagctggctacagatatgtagccagctacagcacggactccaatacgtaatgtgtgtatgacaggtgtgaccagatattaatagtacagtaagtagctattatatgaattggctattacattggctatagatgatttggagctagtagggctatactattaaacttgctcttagtctgcataactgcactgcaatgcatgtactgtactccctccgtcaaaaaaaaaagcaaaccttgggtttccgtgctaaagtttgactgtccattttatatgaattttttttataattagtattttcattgttgttagatgataaaacatgattaatactttatgcgtaacttatctttctaatttttttcataattttttcaaacaagatggacggtcaaacgttggacacggaaaccagagtttgtctttttctgggacggagggagtaattcttaaaactgattgaggtatatgagtatatgacccagaatgcctgggtaaggattaacacatgagcctgaagtttcttttttctttttttttctgtttttagatattcatcctgtaataataactgaacgtgataggtgatctgctgcagcgtgtttgataatcatgtttgattttaaaatctcaatgacaataaagaagggatgcagcggacgagccgtagagaagtacacgtagagaacaaagtcgctgacgttttagcgcaacttctataaagtaaaaaaatagacttaaacgataattatgttcgatttttaaaatagcaatgacaataaagagaagatgcagtggacggtcatggaggagtataatgaagaagcccagtttttaaaggttccaaaaagaatgaatagaaatagtagtagatcgagcaagtaaataaagaataatatgacagaagtaaatggtatcaactagtgtgacttttaaaaactacaaatttagaaacacgaggatggtaaggtttggtcttttaaaatcttaataacgagataactatttaataaatttgaagcaaaatcatattaaaaatatataattttatatgggtgcgccgcgcgattgtgcgggccaactagttcaactaattgaaccgctaatcgtgctgagatcagacaggcagcgcatgcaaattctgaaagggatacatcaatttgtagctaggcaaagttgactaagaccctatttagatactatctccgtttcagattacaagactttcgcattgcctagtagtgaaaaaactaaagtttttcgccactagattgcgccacgtcatcggaaaaacataggacgtccgattgcccctacagatgatgtgagctgttggattcattgattggcaaaatctattctagatccttcgtaaaaattatttcgcaataagatccttccacctccctagtcttaccatttttcattttcacccctgctacctgttgcgagttgcgacaccgtctcgggaccggaggccgcctccccttccctggtcgctgcgccgcgccactcccgggaggcggaggcgccggatcgtgtgctccgcgtttccgctcgcttcctccactcccatctccaaagccgctatgtctcctctcaatctccaccacaatcaatggggaccggagaggtaagaagaagagccaccggcatcgagaaggacgaggataggtgcaaggggacaggccggtcgaagacgcctgcggtgggaagcaaaggaatccatacctcccctttctccccttccacctccccctgccctagccacaccccatcctattcctcctcattcccatccccaacactactgcggcatcacctcctcctacctgttctggatccggcgatggtggggctgattcggatttgggaggtatggctcgacctgacggcgatgcacgcggaatttcacttgtgggtcactgccgccttatcttctgcatctccacctgagtgcctctggttccccaggacctactctgcagcgccacttctcatcctcctccaataacgatggccaagggaaatacaaaaagtcccaacatcgacagctgtggtaagtatctaaacttcttgctcctcacggtgttcatgttggtaaagcatgtacgatgtataggaaccacggcttcacctagtgctaacaagttgatttagactaaaaaggtgataaataagttctataatggagtccttaattaagcctctcatgtaatttcagtttttgggtgggcaaatttcatttaagagcactgtaaaaagaatgcatcctatcaaaatgtaagttcatgttcattaattataaatagttacatacaattatttcaatagttatcaaagatatgtgtgataataacaaatgaatttataagtggattgaaatagtattttcctccgtatgcccaacgtccaactcactgaagcaattcgatggcagtggttcaccgggatataactaatactaataatttcccaaaaaaaaaagtaaggagtagtactagctattcacgcatttagaaaaaagaaagggttgctcctaacattatataaatgactggtgtattgctatatttgtgtatctatatatgtgtgtctaacgagcaaagctgcagcaagcaggggagtggaaacctataaaagataattctacaatgtgatttgcttaagcttaaatgaaatttgactattaaagatcaaatgtatttgactctaagtacccatttagcttccggtttgctgtgaagggtgtattcactgattaagaatgaattttgataatttatgaagcaaataataaagcaatcaaatattgtattatcaggtatttctttttcttgatgttatgagttttaaagcaggaattgaaatgactgtaatattgatttgcgttattggtctttacctgaagtgacaattatgaaataaacgtcctttcaaaatttgtggtttcattttttattcaacttgctaccatgcatctaaggtatgaatcatgaacattagtacttcttgaatggtaaaaactggatacgagttgttgaggaataatattgtttgatagaacaagaaatttattgttgttgactgtgtcatcaaatcaagtcctttttattttcttcgcacgaattctattaagaaagcatttcaattgtacctccaaagatatttttcaaaatttctagaaaccacccaaacttttgtgcatatacccatttaatcaaattggaatgttgtatatacccatttaaccaaattggaatgtatctactcaaccttttgttttttagctatgattccactggtttagcagatgacatctgaacatatgtccccaaataaatggtattgggatcatctttttcacaggttagatactaaccatttcatacagagtgttttggcttcacttccccccaaatatatactttgaatcctatgataaaaacacccccaaatgatggtacagacgcaacaggtgcaattatctccccaaaggtaaaaccgtaaaagtatctcctctgttaaacaaggaagctggcaccatccaaaccaggtaatatttttctcggtactaaaatgtacaaataatctcagaactttagagacactgattctaactttctgagatgtgttcaaccatgtggattgcttatcaacttcaaacttataatgcttagtacagtatcatactatgtaacaacctggaagtgaaattctacctacatttaggttgcgtcctgtgcaagcatgataattattattattagtcaactttagaaagcacctactttaaatttaatattttgttggcccaatggtctaatggtgccattataagtttcatgataaactaatggttgattttacgtagattcaggatttaactactccctccgtttcaggttataagactttctagtattgcccacattcatatatatgttagtgaatctagacatatatatgaatgtgggcaatgctagaaagtttaataatatgaaacggaggaagtaattgtttgtccagtccctttcaaagtcataaattaaattattttgtattttatgagaaaatattgtggaataagcatgtagtagccactggatgagatgactgaactttggaaaccaaaagatcttctacatggtacttgaaccttacttgcaaatataggttagttctaactaactatttaccaagtcctatgtttttttaagtaaaataaatttagagttaatcccattatcatattatggtctatgtataaagggcttatatgtatactgggctaagtcttttgcccagccagctcgcctatagaaacggcgaaaggaaccagaaggtttgctcctatgttgcggttgtgattaatgccaagccctttgcacctgccatgttccaggttgtgatttcatagaaactaaaaggtttcccataaattttgggatgcatggatcatattgtactcttatccggttatgagatgcagatctaacaatagtgttgtggcaagcatggaacaagatggagcctgaagcaaaattcccaaaacacctgttgaagtcaatttcagggccatttttttatgcgaacttggagcaggcttctaaagatgcgagacatgaaaatacaggaaacgttggataccctgattgagggaaaggataatttcatgatatttttatatgtctaataaaaacatggttcatcatatgatatattacgacccataaatatagagcttttttacaggtatctaaagtcatgcaacacacgaccaaatggctagtatctatatgaatgtgggcaatgctagaaagtcttataacctgaaaagatagtagcttttagcaacaaattctaaaaggggtgcacctagccggaaaaagttgactaaggtcctatttgaaaaacttttagcagcaaaaactgcagtggtacagattctgacctaaattctaagaatataaagctatagaatcaaaaaaagaagaagctagaaggtgaaaaaactaaaattttcataaggtacctaccaaccatctactccatccatttcatattataaatcgtttgattttttttctagttaagtttgactaaattcataaaaaaaaattagcgctatctaaaatattaaattaattccattaaatctaacatcaaatatattttaataatattttttattaaaaatactaatgtacttttctataaatttggtcaaactttaagaagtttgattagaaaaatatcaagtgatttataatatgaaacggagatagtatttcttataagctcaggaccacctggagtgttgctgttcagagatctgtgcatcgtgacgacctcgctggaagtctcgcgggacagtgatttgtgctgtgcatctattgtgcatccgcaagccttcttgtatggttgtgtgcctgaccgcctgctagcactctctccatgatctttgcatgggagtatataattttcagtcagcttacagctcgtgtattgcaacaaaaatcaaattaagtttctagtgtattaaatcaattaataagcacttatttagtccaagtaatactataattttttttattgaataagtaggcgattttgaaatttggaaagcaaacattgaaatacggaatgattttttttaaaaggtggtgtaatagtgagaatttgtggcctatagatatcagtgataagagtggtgtgaaaatagataccattactactgactttctaagtccccgtttaaatcccaccttaaaatttttcacccggtcacatcgaacgtttgaacaccagcatgaagtattaaatataggctaaaaaataactaattgcacagattgcgactaatttgtgagatgaatcttttaagactaattgcttcatgatttgacaatatggtgatatagtaaatattgcaaaacgacaaattaattaggtttaataaattcatctcacagtttacagatggattctataatttgttttgttattagactacgtttaatactttaaatgtgtatctgtatatttgatattacgcgctaaaattttatacctgacctaaacatgccaaagtactagtacagacattttctgcttgatagaaacacagcgactggacaatgaagcttcaagttgaacgattctaacgcgcgtgtcgtatgtggagtcaactgcagtggccgtatagcacgccgtgggcattcgggcaagtccattcaacctgctgtcaaccgtgtactccctccgtcccaaaaacaaaaaaaaaaaaaaaaagacaaaccctagtttccgtgtccaatatttaaccgtccgtcttatttaaaaaaattatgaaaagaattaaaaagacaagtcacgcataaaatattaatcatgttttatcatctagcaacaatgaaaatacgaattataaaaaaaatttatataagacggacagttaaagttggacacggaaacccaatgtttgccttcttttttttttttaagtacggagggaatagggaagggttggccgttaggtgtcggtagacattgaccgacgacgactccggacgtgacgatacgtcgctaccagaataaaattctccatcctatccgaccaaacatatgtaaggccgatcctgcctcaaaatttttcacctattcacatcgaacgtttgaacacctacataaaatattaaatataggctaaaaaataattaattacacagattgcaactaatttgcgagacaaatcttttaagcctaagtgatcaataatttgacaatataatgctataataaacatttgctaataactgattaattaggcttaataaatttattggtgatatgggcccgggagtccctagtctaggggggaagaaagcccttcccgtgtgacgcgtacggcgggcccagtccccctcggggggtcacgccctcacatggaaagtggctgcctccctccccgaggctcggggtacctcgtcgtacccctcgggctcgaggggttgaaccacccccgaggccctcgctcggccaccacttggtggccaagcgggagccgtcagcgggcgtgagcactgtctgccaggcgcatttatgagtggcgcagcaactgctcccgtcgcatttaatgcgacatggcacggtgcgccgtagaccgattgacgtgcgcctggcaaccgccttttgactagtctgtgacccggcgatgaatggatgggatgggcggtagtgcgcccacgtctcgattcgtgtcaggcagcgtaggggcaggtatgccttgtcccatcatgtgtaatgggaggtcctgcaggtcgttccgcccaatgcgcgtgtgcccacgaagtcaccaaacatttaatagggaatgatgggggatgtcccccgtgtcagccgaaaagtttcggtgggggccacccaaggttagccgcgcagatcgcttccagcccaaggcacaagacgcattttaatataggcaatgtgggcccctctcccgcagggagagagcaggggtggtgcatgtggtatccccttcatctataaaaggagaaccctgccctacgactaaaggggacgtctcttagaaaatcagactctgggaagaggttggccaagccctagcttgtactcccaggatctgaagtctttgtaaccacacgaagatcatcacacagacaggagtagggtattatgctcgatagcggtccgaacctgtataatccctctctctcactctctcaccttccatttcatgagcctgattctcgtggatccacctcgctcgcgtgaaagcacgctcctcagtattgcacccgctcccccggccgaactcacaaaggggggcctcacagcctcccgctagaaaggatcaccctccgacaaaattcgtctcgcggtttactcacgaattctgtaaatagtttttttattagtgtccgaacaccctattcgacaccctataaaatatctgatgtgacaaaccaaaactttacaccccttgaatctaaatgccccctaaaactagattacacggctagttcttatatgatagcgcatataattttatatatctttattaaaatatattaaaaattattaaaaaaattaattttgtactaacttgaacaaactaactgatgtgtaatgtttatattgtattgaatatacatggtatttattaattattttaaaattttaaatattagtcaattctaaattgtattcctatataggctctaaactcatcttataatatttttatttttaaattttgaagtcatgttacttacaaatgttattctaactagaaaaataataccagtgcgttgcaataggtgaaggttattttaatcttattattgttatatggtttagttaagacgaaatttactgcgggaattcgcttggatatatatttttagaaaatcatgaggtacagttaagagtatgttcgcctcaaattatcatgtgagttttttttaaagagatttcttatacagctccttctgtatttccaaaaccaactcaaattcagatatgtatttacaaaagcgaacgaacttaaaaactgactcatacacggatgacgtatcaaagtatcgacaaaaacatcttcaatttttataatagtagagatatggattctaaacccttctttcaatattccttattttaatatcttaaattttagttatttctaaattgtatttatgtataaactctagactcctcttccaatattccttattttttaattccgaatttatcttatttataaattatatttttattacatggactctaaactcatctatcaatattccttattttctaattttgaatttcagtaatttccaaattgtgttcatatatggactatagaccctttttctaatatttcttatttttaaatttccaaattgtgttcatatatttccaagttcgaattttagcttcttataagttgtatttctattggactctagattctttttctaatatttattattcttaaattttgaattttagttttttctaagttatatttctatatggactctaaattctacttttaattttcttcttttcaaattccgaatttcatttcttcttttcaaattccgaatttcagttagatctaagttgtatatgtatttctatatggactctaaacttatatttcaatatttcttatttttaattttgaatttcagttattactaaattgtattcatatatagactctatattgcttttttcaatattccttagttatttctaagttccatttctacatggtctctaaccacttcttttaattttcttttttattcgaagttttaattaactctaaattgtattcctatatggactctagtctcctcttccaatatttcatatttgctaattccgaatttaaattatttttaaattttatttctatatggactctattttttttatttccaattaatgtgagaatttataggccgtgagagcaaattatttttaattccgaatttctattatttataaattgtatttttattatatggaatctaaactcatatttcaatacatcttattttttaattacgaatttcagtaatttccaaattgtgttcatatatggactatagactctttttctaatatttcttattttttaagtttcgaattttagcttcttctaagttgtatttctatatggactctagattctttttctaatatttcttatttttaaatttcgaattttagttttttttttctaagttgtatttctatatggactctaaattatacttttagttttcttatttttaaattccgtatttcaattcaatctaaattgtattcatatatggactctagattttttttttcaatattccttagttatttcgaagttctatttctatatggtctctaacctcttcttttaattttctttttttattctaaattttaattagctctaagttgtattcctatatggactctagtcttctcttccaatattccttatttgctaattccgaatttaaactattttaaaattatatttctatttggactctattttttttctttttctccgattaatgtgggaatttctaggggtgagagaaaacgtggaggctcctttttctattactttaataagttaatagatggatatagcaaaaaaaaacatgataggaggaaacttataaactctcaaaaagaaattctctcttatttgtgtatgttatccaaatagttatagaaaaattaaaaattttggctaaccctaaactgaaaaagattatgctcaattgtttccttattttaccctttttatgttgaagttatcttttataatagaggcaattgcgtatttgaccctcttttgaagactaactaccaatttgacccctttttttgttaattttgctcatttgaccctttttttcaaaactgaacgtacggtgtgaccctattcttttagggtaaattggaaccattccattataattttgcaaagtttgagatatgacatcggtatctcaatgacatataggacccacatgaatcaatgacatgtgggtcaggatggcatatctcaaattttgtaaaattttaatggtatggttccaattttcccattcttcattctttcttttaagggcatgtaacgatgttatagaaaacacaaaatgcctctactgcccttgctcatttgaccctattttagatttgtcagattttggtcaaaattgacctagatttgttagattattttttcaaattagattccagtttaacaaaatagacttcaatttggttatgtttcacaaatttaacatatattgaagcaaaaaaaataaattaattcatgtctaccaaaaaaacatcccaaaacacaaatccttcttgcccaacactcgaaggtcctatcgccgccgccgtcgccgacctgccactccgctgcccgcacgaatcggcgccgtcagatctgccgtcgacacaccgttgtcgccaacctgtcccccgcatgcctcggcgccatcggatccacatcccgcaggccgagtcgatctgttgctgatgcaccgttgcaactcgagctttgtcgccgccatgccgctgtcaccgaccgccgccaccagatccgtagaccgcacaccatcgcaaccagaactccgccgcccgggtcctgccgtcgctgctccttctcgtcgcaagcctccgccgcccctccccgccaaattcacctgccgtagcccaagctccgtcaccaaatctgcccctcgcagcccgagcttcgccaccgaggcccccgtcgccgccactcttccgttgcgtggctggttctgcaccgtggggaaagctatggaaagaaagaggggagatcaagaggataaggaatgagggtagggttaatgtgtttactcagggttattttggtccattaggactcataaatacatttttttttctttttctaaatgaaactctaacggcgtagttgaaacagggtcagacggctactctaattttgaaaaacatagtcaaataagcaaacttgaaaaaaatagggtcaaattgttaattaggcttcaaaacatagtcaaataatcaattctccctttataatatggtagtaattttaaaatagggattagctaaaaaaaatgtcgagtgatttttgaggggaaaactttcaaatctaactatagtatataatttcactagaactatactataataataataacttgtacatatgtattaaaataatatatgcaactttatatctaactagctgggtggtccgcgcaattgcgcggctagcacccacaaaattatctaatttttcacatgattctacttaaaatttattaaatatctatctcgttgttttaggactttcaaagatcaaacattatcatccccaggtttataattttataatttttaaaagtcacacctgttgctacccttactcctttgtcacccatttatttgttgcgcggctagcacccatccagaattatatatttttaagcatggttttatttaaatttgttaaatagccatctagccgatcttgaaagattgaatcttattatcatcgggttagtttttaaaagtcaataagtcgtcaccccttacatttttaccactcatttatttgattgcccaacctttcacaacttttattcatcctctttgaaactttcatatttagatcttatagttttttagttcattgtcttgtcaattgacatatttatatttttagaagttacatcaaatgtcgtcattgtactgttctacaatccacccgatgtctccttttagttgtcattggaatttaaaaagtcaaatatgatattatgattattgttgtttttttttctttttagaagtccagtcaaacgtcacgactgcgctccttgacggcttgcccgctgctgtttctcttaatcgtcattgagatttttaaaattgaatctaatcgtcatttatttttttattgttttaaaatgtcccatcaaccgctacaccctatttatccctccctctttattgatatttaccattgttgtgttacgggttgttcttttaatatttcttttttttattttgaacttttgttattcataaatcgtattctttcttaaacttttgtttttatttttctaatttcataatttattttttaaattttaattaatcacatgttgtgttgtagatggttttttcttttcatagtctttattattattatttcaaatttagttacttataaatcatctgaattgctggatgtatatttggtgattaaaaaggatcgaatagagacagtcgcttcatttttactagcaacaaatatatcaaagtatgttctaaatagttttgaagtgattagactgaaaaaataatacttacatgtgcacacgtatatacacggctttctgcctacctagttcctgttttgctttttttttccactggaatcaaataggtttagataacagttttagaattggatctcgattattccatcgagcagggcgctttgtactcctatattagcactacaactctaattcctatatttatatataggtgttatatctcaaccgttaaattatgaacgttaaattgtgaatccactataatctaaacgtttatctgactgtcagtttatagcggcttgcactaattcatctcctgtgaaaaatatacactaattacaatatgtcgatatcatgtgtactttcatgaatatcaaagaaacttttggtgtttgatgcattgccggctgcaagtattgatctgtttgttgtaatgtctatgtaaatatcatgtctttttactatggtcggctcccgctatcattgggttctgccgctccagcccaatcgttgctgcttgaaatctacagaatatataggtgcagcagtgcaagctttgtttatttggcagcacaactcttgcccgtataggtttgtaattgaattagattatacgtgtactgtgtacaccgccaaagaaacagaaaaggacaaagactcctagtatgtaacgtacacagttctatagacttatcttttctactgtaaacagttaaaatctagaattgccaaaggttttaattgatcttgtattgggttcttatatggactcctatttcagtattgcttatttttaattccgaatttcagttattttttagtttgtatttctacttggactcttcttttctttttcttcgattattgtgggaatttctagcctccacagcgaatgtggtggcttcttttcgagctgtcttaataatataatagatttatatagagataacaatgtagttattagtgtagttacaatgtaactagcatgtacttagaatataacttagatgtaacttaaacaaatctgccataaacatgcgatgatgagactagcttgtgaaaaatagggtttagatccgatagcaaaatatctcagcacaaatcttagcgcggaatcgacggccaaaaaattcaatagttttcactcaggaaagctgtcgacagttagctagtagaaccgtttacaatattacaacatctatggtttatgtttcgcccatagtttagagttccactaatctctcgatcaaatctctaatttaaggacatagctgaagaataggtaattttgtgatttacatagtgtaagcgaatttttatgaccatattatatagtcatgttaatataaatatgtgagcttgcaatttaatttatccaatatctttatctttacctacttaaaatatttatagtgcttataccgtcccacctctctatctctacgattataaaatttaaaggtgtttctatagttccacctctatatctctactattataaaaattaaaagtgtttttgttaggggcttggtacgtcatccatctttcatacgtatccatcgttcgtctttcacactagtcctatcatatatatcgcatatatgggttagcagataggatgggattcgggaaggcccgattggtacatcgcgagtccatccatgactcctctttgtccatataagtggctccgtcgagcattgttctccatcactaattatatacgttggcatactatcaaagagttcgattaaattacatttccgtttgtcatctaatttttggtttcatctatggccggccaccatcaccatgagtacctgcataatatatatgcatacgagttgtaagttgagtctccaattgaaaataatatacatatacgatgttgctatccaacttcagcatacaatcaaagcagcgatgaaagtctcacacacgatagatgattcaggccgtaatgaatattgctgtgcgcctgttagttgtgcccacgccgtaacacggccggacagcaatcggatgatagcaatgtacgtattgtaggtttgtttcaaatatatttgatcacgaggtgaaacctttacaattgttttttaaatcgacctcctgcgaagggataagtcctacgttccaccggcccaggcaattgtatcgttcagaaaagctaacgcgcgcgtgcgcgttggcggcgagcgtttccgatagtttagcctaattaattaagtgattagtagataatgacggtaattaagatatgatttccttttttccggaagattttttctgctaaccgattgaaaactttcaagttagatatcaaaacttttgaagttaaattttaaaaacttttaaaacttaatttgaaaattttcaactcgaaatttaaatgtgtaagacaaattttgaaaactttcaactcgagatttgaaaactttcaagtatagatttgaaaattttttaagttaagatttgaaaaaaatatgagaactttcgactcagatttaaaaactttcaacttgagatttgaaaactcttgactccgatccaaaaactttcgactcagattcgaaaactttcgactcagattcgaaaactttcgactcgagattcgaaaactttccactcaaatttgaaaactttcaactcaagatttgaatactttcaaatcagatttaaaaattttcaactcaaaacattttgaaaaaaataagtgtgctaaagattaaaaaaagtaatcagaaaaaacgaaaaaaaaacacaaaagaaaaaataaagaagaaatcgcgaaaaaaaaagaaaaaaatggctgatgggctgggaggcccgggagtagctggcgcgcgcgccaactagcaatcccctgtattgtctacgtcggcgtcgttcaaggctgcatcagtacattcaacctcttggattgctctggtttggatgatatatttgcctgcctatttatcatatgtcttagttaatctagtcttagtaactcaatttagctctatcggttgtctctcgctttagggtttctgccagtatcggctaaattgttttactagattagattagctaaggcatctaccactctaaaaatccgtcaagggcatgatcgtctagatattatgtttcttttcatacttagtgttgtattagttaagtttgatctactaagttgtgcttagaaccataatccctagcctacttgttgactgccaataagggttttatcggggtttcaaccgatgagttatctggatgttgcatcggcttataaggactgcatatataagttggatttagccgatgataacaaatatttcattgatttatctaatgttgtggattttatgacatcgaacctccagccgatgtatcatttaaccttcagatcaatacttgttctatcatatcattgttagtcgaatggtttctattggattacattgttgctttcttacattatcatcagtcgattgcctttatattgttatttacatcaagcgtcagaatctacatcagaatcatagccgatagctcaaaaccctattgctatcggctagtatcggcatcagctggaattaatctatcggcttgccagccgatcggctcattgatctgctatttgtatatcttgtcagttacagaatcaaactgaatggcactcccgcatctcatcaacatcttgaacctgcactagagttaagcagatctcccaggccagtgtgtgtttttcgcatcaacaggcccacaagccgagcagcagagcgcggcccacatatgcggggacggtccgatgcacttccgcaacccattgggcgcagcgtaaccagcagcggtggtggcccaacactgggcgaatctgagccgtccgatctaatggatggatctccgatctaatggatggctccgatcgtccccgtgccggatgaagcgccgaccaggagagaggggcaaaaccctagctcccaaatccctctcccaatcccatttctctccggcgacgagcaagcggaacgacaacaaaggcggcaatggcggtccggcgagctggtgcgcgcgtgtggtgatgaccgccgagcagctcctgctttgccggctgggggccgcacccgagggcggcacaaagccatgccacagtgtcggcggtccggctaggcaggcgcgcaaatggcgacgagcgccgagcggcctggacctcatcggtgggaggggtgacgccaagccgacgcttcccgtcttcggcaagggacggtggaagggtgctccaggacagcgcgcgcacggggaacccgacgcaactgcgaggaggtgaaggtgcggcggtgccgcttcctagaaagctccggtgagcttaggggcttcaagtccggtaagtaacccgaacccttagattaattggtttggattttgactcttagggttcttaccagaaattagggttcttcgaatttggggaattttgtcgggaaatttcaatctattttattccctctttttgagttacgggagtttcaatatcgtttatcctcttttaattttgggaacttcaatctagtttatccctttgctcaatttcagtttctttttcttttgctttggccggcgtttcatcgcgcgggcggggacggagtgcgccgctcggtcccctcggaaagattgagattaagataaaataagattttcacagacgattaaagtaaattgaatcagactttctttttttgttttaatgttttttcaccctttttcgttattacggacgacagaaatgttttttattttttaagtagagatagagatatatagtaccgtgtcacgaataagagaattcaattttttttactgcgtcacataatttttttttgaatcggacatattcttttttttatttttttcgcctttttttatcgcgtcgacggaatcggattctttttttttctttttttcacccaattttttttcgccacattccttttttttcaatcggacagattcttttttatttttttttgcccgtttttttcgcacggatgatagatgataggaacatctcttatttttaaatagtagaaatagagatatggtccgtataactccatttccattttagaaaaacagttatggaaatagttgagattgttttctactgtttccaacccttttcgtcgctactcctacatgcgcttctatctctatttatactgtgaattccaagcaatttttctgcccgtataccaatcacccttgagctcccactcaccttcagttccattggcgctgaaaaacataaacaggcatgaatgctctagtgatcttgctatgctccacgttgcttttgtattcccctgcggcggtatgcacggtagggagcagcagcagcagcacaaacgccaccgacaagcaggcagccgcgctgctctccttcaggtccatggtgtccgacccatccggcgcgctcacctggtggaacgcctccaaccacccgtgcaggtggcgtggcgtcgcgtgcggccgcggccggcacgcgggcagcgtcgtcgcgctaagcctcggctcctcgtcgttgtccgggctcatctcgccgttcttgggtaacctctcgttcctgcgtgtgctagaccttggggcgaaccagctggttggccagattcctcccgagctggggcgtctcggtaggctccgagagcttaacctttctggcaactcgctagaagggggcatcccaccggcgttggcgataggatgtagcaagctcgagagccttagcctggactccaaccacctccgtggtgagatcccgggtgagatcgccgcgttgaggaatctagcgtacttgaatcttcgtgcaaataatctgtcgggagagatcccgccatccctgggtaacttgtcatcactttacttcttgaatctagggttcaacatgctatttggtgagattccagcttccttgggcaatctttcccagctcaatgctcttggtattcaacataaccaattatctggtggcataccttcttctcttggtcacttgaacaaccttaccagtcttctcctacaagctaacggtctgatagggtccattcctcctaatatttgtaacatatcattcctaaaacatttttctgtagaaaacaatgagctcagtgggatgctaccaccgaacgtgttcaacacacttcctatgctcgagactttcgatgcgggggagaatatgtttgatggccatatcccatcatcactggttaatgcctccaaactctctagatttcagatcgcggaaaaccacttcagtggtgtaattcctccagagttaggagggttacagggtctcaagtggtttattctcactgaaaatgatcttgaagccaaagaatctaacgactggaagtttatgaaagcattaacaaattgctcccaattagaagttttggaattggaagccaataagtttagtggaactcttccatccgtaatttccaacttatccgcatcactaacaatcctcactctagctagcaacaaaattgtagggaacatgcctagagaaattggcaaactaatcaatttaggtgcacttgtcgcacataacaattttctgactggaagtccaccgtcatcattaggtatgcttcaaaacctaagaattttgtggctagataacaattactttagtgggccattccctcgtgttatatgcaatttaactcatatggactctttagaccttggaaggaataattttagtggtagcatcccaataacagtgggaaacatggtttcactgtcgagtctacgtttctcgtttaataactttataggtaccatcccaactagtttattcaacatcacaacactctcaatatatttggatatctcctacaatcacttagacgggtcaataccacctgaagttgggaatctaccgaatcttgtataccttgatgcccggtataatcaattatcaggggaaattcctattactttcgaaaaatgccagcttctccagattttgtatctgcaaaacaattcatttattggtaatatcccatcatcctttagtgagatgaagggtttagaaattctcgacctctctagtaacaatttttcaggccaaataccaaagttctttggacacttcctcacactctatgatttaaacctctcttacaataactttgacggtgaagtgccagtgtttggtgtttttgcaaatgctactggcatttcggtccaagggaacaacaagctttgtgggggcattccagatcttcacttgcctacatgttctcttaagatttccaagagaaggcatagagttccagggttggcgattgttgttccccttgttgctacaacaatatgtatcctttcattgctccttttcttccatgcttggtataagaacagattaacaaaaagtccttcaacaatgtccatgcgagcccatcaacttgtctcctaccagcagttggtacatgcaacagatggcttctcgacgaccaatttgttgggtactgggagctatggatcagtctatagaggtaaattgttcgatgaaactggtgagaatgaaaatcttatcgctgtaaaagtattgaaacttcagacacctggggctcttaagagtttcacggcggaatgtgaagcgatgaagaacttaagacaccggaaccttgttaagatagttacagcatgctcaagcatggacttcaatggaaacgacttcaaagcaattgtgttcgacttcatgcccaatggttgcctagaagagtggctccatcctcagatagataaccaattggaagagaggcacttgaatcttgtccacagagtaggtatactctttgatgtggcttgtgcattggattatcttcatttccatggcactacacctgttgtgcactgcgatcttaaaccaagtaatgtgcttcttgatgctgatatggtagcacatgttggagattttgggctagccaagatactgtcttctcaaccctcaacgagctcgatgggatttagagggacaattggttatgctccacctggttagtttatcattctttttatttgcatctatcgatttatttaacacaagaaatttacttgaaaacattacgacctttcaatcgtcaaatctctttcaccatagacatagcattatcatttacccagtttacttactctcatcatcactgttcaattcaaacagaatatggtgctggaaatatggtttcaactcacggagacatctatagctatggaattcttgttcttgaaatgattactggaaggcggcctacagataacacatgtgagcaaggatttagccttcgcaagtgcgttgagatggccctgaataatcgagcgatggacattctcgatgtagagctggtaacagagcttgaaaacgcgccgcctgcaacatccatggatggtccgtcagaaagggtgaactccctgatttcgctacttaaactcgggctgctctgctctggggaaatgccattgagtagaatgtcaaccaaagatatcatcaaggagctgcttgtaatcaaaagggcactcgcttaagaaagcttttttttaagaggaaggtcacaacttaagaaggcttttgagaagcaaaacatgccaaattatgtgctcttttttattattcctgatgtatgtgcgattctctttaatttctaagacaaactcatgaatgcatgggtttcaaagaacaaaagaattgtactggtgtaatatgcgatatagattttctggatcacggtgaaaagatgttgccgctgatactctctttttcctgattgaatatttgtaaagctacagtacctgtttgagtaaacaagctgaacttcacatgtatcgaaaatgcggccttaattttcctttttttagatggttgatttttttttcaccattttttacttctatataatacatggacaaaaaatcgtatctaatctaatattctgatctgacaaaaaaaaacaaaaaaaaaaggggaagaactcaagtcggtttctccaattaggccgacaccaagctgtcggttcggcccaaaacctcgcagccacaggagagagaagaatcgcgaaggaagaaggccggagaagcggaagcgagagcgcacggcggaggcgaggagggtttcatggagcccgagaaatccaaagaggcggcgagccagccgatggaagcggacgccggcggccccgtcgatccccgagaactaggtagctctcccaatcccccccttgctttagatggctaaaatctttcatgcgaaccccttttgcttcctcctccaagaaccggaagtatatataaatcgtgcaggaaatgggagatgcctgacgtgtcctgactgatgcacctgatttcccctcttttggttttgtgttacctctgaatttgttagtgtccagcgacgatgagatagattactccgtggagcccgagttctacgatcccgacctggatgatgtcgatgagcggtgggtgagcaagcagaggaaagggaggacttctgacgccgtgctcagctgccccgcgtgcttcactaccttgtgcctggattgccagaggttgtctttccttactgcttcgaactctgtgaggaggcttctggattccaatatgcatgtttattaagcagtcactagttctttttagattagtcgatttactatttttagttcttggattggcacgatgcttttcctgatgatgaagaaactatcaggattgtggtgctgctgcctgtatagggtagatgctatcaataattttgtttggagaagttggtgtatgttagaccatgaggagtatatctatacatgtgagcaaatcttttgcatacaatcgacatccatgctcacaatgatcaaattggttgatttaagtggctggaagaaataatggaacttcttaataaatggtttatgctaggattagttgttcctgaatttttagtttgattttgcttgtatgggagaaacgctcctgcaagtggaagacatagctatttgtaaacaagtcaggggtgtttaattgcttatctctatgatgaaatggcgactctaggaatacattagtggtatatcggagatttttggttggcccatggggacatgccacaattatttgtattagaggttggacttacttttcagaaacttgcaatacattaatgaaccatttcaaaaatttctgaagacacctgaaccactgcgacaatcttgcaacatgctggaacattcatgatgacttatttgtaacctgctttgtaaattgaattatccaccttgaaagtctgaaatcttcatgaaacttactttggtttgaaactaaaataaaacctgcttggaacttgtgttggtaaccatatattgtgcttgatcattttcctctccagaatatgcaattatatcacttgattgtactgagcatgtccaattttttaatacaaaattgagaaatctagatttgtgggaaaaaaaatctggaggcaagtttatgtgacctatttgcaattctttcagtaatcattttatatcgtgaaacattatgctgttgttttcatttgcacaatgttcagaaactcctgaagttcttactttgaatgcttcaaatcttcagacaattattaactgtagtggctttctttgatgttcaggcatgagacgtatgtaaatcagtaccgtgcaatgttcgttcgcaactgcaaggtcaagactgatcagattctacgggaggggaaaggcaaacggaaaaaccgcaagggaaaggctgctgattcttctactacatcagaaggtgaaaagaagggtgcagtttatcaccctgtttgttgtgaggtttgctcaactgaggttggagtgtttgatgaagatgaagtttaccacttctttaatgtcattcctagcaactcctgaaacttgttcttctgaatgtgtagtttgttgatccgtagccactgatgagatctgtacttgctttggcgttctactgttaaatcaatctacattcaattcagtcaggtgcatttgccatacttttttttttcatttctgttgctaggagttcttcagtctaaaattataatttatagctgtattctggtatggggcctgatgaatttcaccaagaatgttggcaagttcctggaatattggaattgcaacattaattacttcaatgtgtgtttttttgtgctgtgcagaattgctgaataaattaatgattcgtgagaattattcgagggtacaaatgaacgaatgaattattataaagataaaaatggatttaagacagtattataagaaatcatagcatttaggaattcgggaaagtgtgcccatttatccattcattcgttaagcagagatgtcctagtatggtagtggaccagaacgacaatgggttgtgaatagctacagtcctgtttggaccagaacacaggaaattttgctgggggtagaatcgaattgtttctcgtgaaattcacagctcatatcctgtgcaagaacatcaaaactgagaggagcagaagaggttgtagcttcagtgtaaagatacgaacagtgcacagtgtttcacttccgcggtgagaatagagagagagaaaagattgcgttaaaatcaggtggcgggagaggtcgccgacatgctctttttgagccaacgaagccatgaagcctttgccgggtggggctccaattatacgctgaaagcgagtaggcgaccaacgccatatgcatatccaaaactaggaaggctggtagccggtccattcgccttccctttcaacacaggtcatcatcatcgcttcatcgcccctgtaccccccctcgcttctctgccctctcctccctctctcgacgtctttctccagtcatcttttgttgaaaaaaacgctctcacaacctcccgcaaagtcaactaatcaacgcagtttttggcatcttcatgtgcgtattgcgattgctacttggttgtacgggctaactatagtattaaaaatcacggatggctaagtggtgctggtgtgtacctagttcatcagagttcaagttttagatttagtttagctgtccaatgtttttaggagtgcttatgcatgtatgctaggttaatacgtggtgtcctcgctacagggggtgggtgtttgatgcctccaacattaacttaaaacatgtgtacaggacttacaaatgtttgtgcgtgcaagtggtggtatgcaaacacacaacccaaattattgggaagtggcaaatcctctaaagaaaaaaaataaaaacatgaataaaatgatttactcttattgtggtgggattagctcatcggaattcaagtttctagacttaccgcagatgctcgtatttacgattaattattcttagtggtatatgacatccgttgacagcgagatgtttatagttacgtcgttaatctcaatatatgtcatccagtttttgaaggtgtttattatagagttaatgcgtgcacatgtgagcgcgttatagggatgattgtgtacgtgtgttttgtgcctgtttttgtaaggtgtctttcaaaaaatgatattatactacttttttttcgaggaaacgatattaggctcttgtctcgtacaacatccagtggaacacatggttttgcatgatctcacaacaataatcagttcaatctccatagatatcctcgaaaattcctgcttttgcaaacaaccaaccctaaacgccaagccatggatcgcatccccctcatccatctcattctcaccgtacgtttccttcgtcccgggtgatgatcgatcgatcgatccagctgccgccgtccatccaagctttgggcccccagagcagcagcacccacgcccccacagctcatggctgcaaaaactgtacgctacagcgttgtacaatgtacatgtccacgtccatacagtcgcagcttggacgacggaaacctgtacacagtctcgtgcatgaccacatgataacgattttttagtaggccaaagaccaaagttttttttttctttttcctgcacatccccagcagtagcccccatcatccagtgtccaccgaatcgtcaccgagcttttggttcgaaaacgatcgatttcctcgcgcgaaacccccacgaatccgtccgtttttgttgctgctgctgctgccgccgccgcgaaattccgagatctccctgtctcggcagccagcgtctctcaggtcgctgtgcctgcacagtttgggttctttcacacgtccagttcagcacccacggggataagatattgtaatgagctcgagccgtcgactattaaactaatcctcgccgtgatgtgatacggtggtagattaggcttaagctatgtagcgtttgctgctgctactatttgtaaaagaccctgcagattccagcaaagtgtgagagctactggacccagattcccatgtgccctgccccccctatggtggtacagtactactgctgcgaccacactgcctcttgccctcttctgctcctcccatttctcctcctctccttccctcctgatcaaggtcaggtctctctggtgacccagataattagcgctcgcatttactacgttgcacacacgagtaaaataccttgaatagtatattccgtattgccatttcgctacgaacatgtagcgtgtagtgcatggctgcatgcattagaatccagacaaaaatgtgctggtattgttgtatagtagtaataatgttgattactgtttcctcaatcatgaaataagtttatttaagccatcatttgcattagaggctgtgaaaatataagataaatacattaacaatagataaagagggagataataattgcattaggatttgatcaagtattggatattctagttttttcgattgtattggtatatgaaatgaattacaattaatttattttgagacgaaagtagcaacatgtactactactagtacttcatgagaagaaattttgtagaaaaaagtaagtggggggggggaagtgaagtactatggtaaaatacgcagaaaaaggccctgtatagatgggactaaaacttttaagtccctatcacatcggatgtttgaaaattaattataaatattaaatatagactattaataaaacccatccataatcttggactaatttgcaagacgaatctaatgagcctaattaatccatgattagcctatgtgatgctacagtaaacattctctaattatagattaattaggcttaaaaaatttgtctcgtgaattagcttttatttatgtaattagttttgtaagtagtctatatttaatactctaaattagtgtctaaagacagggactaaagttaagtccctggatctaaacaccacctaaagacgagcaagtctacatcaagtccattataaatctatccggcgtgtccctctccccatcacctcaaaacctctcaaaccccacaggcaccggaccaccaccaccattggcaccacctcgcatcacactctctcgctcgccatgagctcccgcgacgccgccgccacgttccatgtctaccagcccgtgcagatcccgacggccacggtggcgcccgctgcggcagtgtcggcggcgccggcagaggccgtcgcccagctggtcccggcgccgagcaagaaggcggccggcgcggcgggtgggaaggaccggcacagcaaggtgaacgggcgcgggcggcgcgtgcggatgccgatcgtgtgcgcggcgcgggtgttccagctcacgcgggagctggggctcaagtccgacggccagaccatcgagtggctgctccgccaggccgagccgtccatcctcgccgccacggggaccggcaccaccccggccgccttcgtctcctcctccgcgccgtccacctcctcctcgcaccagcacaccctcctcggcaagcgccagcgccaggagtccgccgccgccgacgccgtctccgtcgccggcgccgcgtccgcgttctgggcggcgctgcccgcaccaggccggcccgacgcctggggcttctccccgctggacgcgcagccgacgtacgtgccgatggcgcaggcgcaccaccaccacctcaacctcctcgccgcgctctccggcgccgccaggcgcgccgaggaggagtcccggtgaatcacgcacagcagcatgcatcttccgagctctgacacgtctttcgctcaattcaccgacgcgtactgcactggcgtccgtacgccttgttcttgggacagttcttgattggagtgtgcttcttctctctaccccgtggatcgatcgttttgccttcttcctgtgcggttcatcaattgctcaagatgaaattaattgttgctgtggtgtttaagctcaaaactgtaaatacgagtccttagatctcatcttactcctacaaattccagcgccgcatgtgtttgtgtgtttgccacttgtttccagctcttgtgctatgattccatggaacttgtttcagtttagcttcatctacatcgttgtcagaccaaatcatttgacagttacagaaacatgttgcattgagctgctattccttgtgtgcatttcctatctcagcagtctatccaggattatagcgtgcacatcaatcacaatcttccattgcttcttttttgaaaaagaggaaaaaacaatgtttcattctttttttgttaaacgaatcggcgcttatagcgtgctaactttattgaatatagcaggagaaaaacaatctttgattgctcatggaaatgttcttgagctcatttcgatcgtaagtaggaggagggatgtaaaacaaagcaattgttgttcaactaggcgtaggagaaggcattcgagcaagtctgagaatttcctcggttaccccatccatggctgcagattacaccaatgataacgctggctgggaagatgcccgttctcctgtatactcctctggtttcttttctctcaaaaaattcgcctttttttcccctgctcttcttctgcaagtgcaagctatagctccgagcggggggaaggaaaaggaggaaaggctgcggcgctgcagcggcatgcagtgctgcacagtgcgcgctgctgctgcggccgctgccgctgcctgaagcttttgcccatggtgaaaggttgaggccgttgtgcatgtatagggctcgtcgttgcgtgtcaaagctggacgcaacctctcggcctctgaactgtaaagatgccctacctttcgtacaacgtcctgcatgctgccatgtcccgtgctagctactactctctcttgcaattgcaacacagcggactactcctaccggctagaggttgacttggcatggcaggccggttactctcttgttgcactgtacatatattgcacattgctatatatactgcccctctagggaatgtaattaaggaggcatggttgaacgtatcaggtaaaacaaatggagggtcacagggcatgttactacatgatactcctagtacttgacaatcttatttttggatgatctatagtttgactgtgttagtatagtgtgagaacaagaatttcctgctagcagtactctacgcagtattagaagcgccgggcggaaggatgcaaatttggggtcgctgtaaattcctggtcaaaatggtcaggagatcccaataagagagacgctagtacaatgtcggttggtagtctgacctgtcaccacgtactccgccatgcagcgtgtcagtagtataaacttggacaaggtagtaggagtagtacgtgcgtgcgtaccatagctatcccagtacgtacgcgcgtactagtaccacacatccctactgctttgcttttgcagcgatgcaatactggtgttccgagttctctttgctctcaacattttggaccgctcattcagtgattcagactttcactgtagctagataggagtatactagtagtactaatgatcttgttatgcatgtaagcgaacaaaagtgtgtgtcaaggccggcttgaccgagaaaaattgtccgtccaagccgtcctggctcatggctgttcgcatgcacggatctctcagaggcacggggagcctgatgtttctgatcggccgcagactgggacggtccgtccctttgccgcctggttttggttggtggcggccagctgctgctgctgccgctgccgctgctgcagctctgcatattcctcctttgcgattggccggtacaaagcacatgtcgcggcccgcgggcgtggctgcgcgcgactgtgttcgtgacagtgtgactacgtactgtgtcgtagtcgtcgtcgtctactctgccgcgcgctacgtactcttactccgagaggcgagagagtgaggagaggtgtggtcgccgacggcgagacactggcatgcaccaccgaggccggtggaagctccccggcagatttggctgaaaatgtgacaccatacctatgaccggatgatacatcttgtttctatgaatttctatctagatttatcttatccagtcttacactcttcatcaaaaagaaaaagctaaaatcctaattgcacattttcatattcataatcaggatttaattttcttttaaaatatataaaaatatgttgctacattgtgagatggagagactacttttaagcaataccgtacctgtggtcctgactctttgtcctctttgtcttgcctcaagagcaacacgtagagaggtggcagcaggtaatactgatagagtacttgtaagggcatcagcaatcaaagatactctatgggtgtcctcactaaccgaagctactctatgggacacccatctcacaatggaggatactcgtagctggattctttaaaatcttaggcaactttatagggctactgcagcccacaacgggtgtcccgactcaaagtagcccagtaagaaatgaggatttttacggtactctatactgcaagtatatacttatagtataaacaatccaacggtgtagatttatctgatcttcctctaaattaatttgcagtataaatttaaaagggtatatttgtctttccatcttttttacgtggggatatttttgtattttcgcgttttctttttgtccgatctggctcgagagaaatccactccagagaattatgtttgctttccttcgtcccatgctctatcgacgccgccgacaaccaaaactctgcaagcgcctgagccaaactcggtgccatcggcgacggcgcgccccagcctctcgttcgcccagtcaccagccctagcaccattgagaaattgcactgatagccaatcgttgttttcattttgcataactgtctcctggtgccgcctccatgcagggattgatagatctggcaaatcatcccgtcataaactaattgaacaagaaatatactgagaacttgatatgtctggcaaaaaaaaaaatgaactagtcatctatcaatttcatggatcatgcatggctatgcatgtcaaaacttaacagtgctgatatatatttttagatgcaagtgcaaccaaaaaagtgtctactaccgatggaaaattactcccgatgacaaatctcaatttcaaatgactaaacagccatttttagattttttaacaaataccaaacctacccttctatatactgtaagtatatacttgcagtagaatgtaccgtaaaaatcctctaaaaaattccacccatacccctcccaccagcccagtaaaccgtctaaacttctcatctcttcctctcctttctcgtctcctctgctcgcgcccttctttcttctcgcctccgccacctccctacgccgccactagatctggtggccaccaccagctcctccaccacctctccgagtccgattcctccccaacgccggccaagggtgaaaggggaaatttctggtgggggaaccgtgtccacaagagacgacatcgtccaacgcgaaacctcaagcgagtggctcaggaaaaagggagttgaggaggctgggggtgcgttcccctcgtgggggtcgcacctccctgttgagacacggctcatggacggggggcgaacggcgtgagcgaggctacggtccaggggcacccattgctgatgctctaagagcaggtataatagctggctataagccagctataaagatgttttaaagagataaaggaagagagagaagagcagcgggctatagatctgtagccagctgcagtacggactccaagacgtaatatgtgtatgacatgtcggatcagatattaatggtatagtaagcaattattgtatgaattgactattatattggctataaatgatttagtacgttggatatataatattaaacttgctctaataaggtggttgctgggtcaaaacttgacttcgatcggcgcacgaacgctttgaacggcccccgtgcttcgcttcgtgagcggccagtgcgcatatacagcggggtttcggggcttctggctggcgctgatcaactagctcctttctggcgcgccgtgccgtgtggccggcgcatcgccgcctgcgcctgcgcggccctgcgtgcagcagtggataagtcttggccattccgtgaggttctctccgtgtgacaaaacaggtcgcccccgagaaacacaacggcacacgtacggcaaataactgtgatccatactgtgtagtacacctgtagagcctgaattttatcttgtctgacgaatggccgagttgctgcaattttatcgtctggcaggacgtgattttcttgtaatctgtggaacgggttttgcttcgggcactcccagactcccagtagtagtaggagagatccgagtcttgcatgggatccagcttcaacgcgaaacctaaccagaaagactccaccgtttaaaaataaatttactccctccatctaaaaatatttgacgcggttgactttttaaaaaatgtttgaccgttcgtcttattcaaaaaatttaagtaattattaattctttttctatcatttgatttattgttaaatatacttttatgtatatatatagttttacacattttacaaaattttttgtataagacgaacggtcaaacatatttaaaaaaaatcaacggtgtcaaacatttagaaaaggagggagtatatccttaccttctatcttcaacttaaccaatcataccatccttcatttaatttttaacctactttctcttcctaactactccctttagcttgataattctcgttgttttggacaagataatggacaaacttcaaaggctttgattataaataacatctaaaataattatcttacaaatatgaaaaccatgtgtatagataagtcttgaaaagtactttaataaaatcatatatttaataatatttatatacatattataataaaaaaaatagtgaacaaagttgtttttttaaagactgtccttattcaaaataacaagtattatcaatatagagggagtactttttaacgctcatgctcaactaaggaatccttacgttttaggacggagagagtaccatttaagtattcatatagtttcttaacattaattgattaaaatgggatttaggtaaaataatttgaaattgattagatagatccaaacacaaacactgggcatttggttctttctaggtgttttagttggatataatatgaaccacttagttcacttactataatactccctccgtcccataatataagggattttaagtttttgtttgcactgtttgaccactcgtcttattaaaaaaaatttagaattatttttttttgacttactttattatccaaagtactttaagcacaacttttcgttttttatatttgcataaattttctaaataagacgattggtcaaataatgcaaataaaaactcaaaatcccttatattatgggacggaggacggagggagtagtatctacttcactgtcccaaaataaatcaattcctaaagtttaaactttatcctaaaataaatcaatttcgactttcttatcttttatcgatccaagaattgaaaagtttttttcccttcaatacccttactgatccacctatcaatactacattctattgatgagggacaatgtagtcttttttttccttagtactaattttgtctgggaatgcgagggtgcaatttggcttattttgaaacgaatggagtacttcaagtatctaaaattagaataggcacgggaaatggagtattatttaattaatggcattctcttatccaatgtttgcaattttggttcgaaattcctaaaatcatttcacttgaaaattcccatatcattttttaatttagcaaaaaaaattcaagtcggtcaaaactgttcaaattaaattacaagaaaaaaaatcatgccgaatatcctaaatgcgcagaacgtaattaccaaccctgctctacctcggtcagcaaaaagaaataatgggattcatgtactaattaaaaaaacactgtacaacaagctgaataaggaaaacgaaccacacgaacgtgcacttgagcgctgatctgtgactgatcatggcagatcgatcaatcgtcggcatgaatgaatgaataaccgaagctcctccgatcggcacggcgcacgcagcagcgggtgatcgtattcgatcgtacgtacgtgcacggtgcacccacgtcggaataacttcgaacaatcaactgagcaagttgccacatactcctacaatttttgttcatgcgcgtactctgcccatcaagcttcacgccattttgcacggacgccgcgcgtactacggttcgcggcgcggtcgccggccggcgacctctcaccctgcctggcaccgtagcgggttctatcacgccggcttcttgccaactgcacggctacgtcctcctccgccctcagacgcagcaggatcgcggccaacgtgacgtcgacgtggccgtcgccgtcctcgaccaccgccgcccgcatcgtcctccagccgccgccgtacagctcgccgaggatctcgtggcactcgcggccagggaagaggtcctcgagggcgccgcgagggtgccgcgttctcgcgagctcctccgcgcgcttgatcgtggcgaccagattcgagtacctggcgtggaactccaagatcttcctgaacgtgacggcggcggcgtgggggttccgctccgtgacgagccagcacgggtcgccccccgcctcgccgtcgtcgtcgtcgtcggcggcggcggcggcggcggcgacggcggcttggccgatctggatgcctgcgttgcggggcctcttgggcctactcggcttgacgcccttgtccttgtcgacgtcgtgggcgggctggctgatctggaggaggtcggcggcgcgtggctttacggtcctgatcggcttgacggcgtcggctgcgaacgtgttagcggcggcggcggcggcgcgtttgcgcttccacgacgacgggccgggacctgcacccgggtcctccgcaaactccggcggcgggcccttcgggaggaactcggcggagcagcggagcaggtctcggcgtgccggaccaaacactttctcgagctgtgcgtacacctgatgagcgtccatccatctcttcttgtgcaagtcggaaagcttgacgacgaccctgtcgtaaagcttctcgtcctccgccttcacccgctccaagaatcgcttggcctcgagcggcgacacgtctcccttgccttggggctttgccgttgccgcagcgggaaggtgatcggcggggagctcgatcttgtactccggacggacgaaggtgttgaactccgcgatgaggtcggggtggtcgccgaggagcaccgccgcgccgtccaccaccagggaggtggacgcgttcgcgtacttgccgtactcggtgaggatggtctcgagccccttgtagacgcacggcttcaaccagaagcggcttctcaccttcctcaggaaggcgagagccgcgcgggtcagctcttctcggttcgccggcgccggcggcgacgccatggccggctttctcggaacagagaagctaggcgcgcggtcgatctgtctgcgattctgctgcttcgcgtgtgtgtgctcggtggatgagggtaattaactcccgtggttctgtatttttgtgccgcggcggatcgaggtaaactcgagtttgtttcggacgcggcaattggagatcgtatcggtctactagacgatcaaggtcagttgaaatcgagccattttcatgctcccgtgcgcgttcctggttctttatttttgtctcttggactcttggtggatgaggtaactcgaagttgtttcggacgcggcaatcatcatgtgtaacagtgtaagtatgttgaaattctgtaaccacccagttgagagagaaattggcgagggatgaaatattaaattttgtaatatccaagcggggatagctcagttgggagagcgtcagactgaagatctgaaggtcgcgtgttcgatccacgctcaccgcatgttttcatttttaatgtatacgagttatttttttttttgctcatcgcatgttttcatttttactatatatacgagttatttttctcctcactagcatattttcatttttaatatactagttatttttctccttactcgcatattttcatttttaatatactacaaaaatgcatgatttgacaaaaaaaaactatgtcaatttaaatgataaaaaacaaaataaaggtcaaaaatcatatatagcattgaacctggttacacgagttatttttctccttactcgcatattttcatttttaataaactagaatttgattaaaaaaacaatgtcaatttaaacgacaaaattaataacaaaaaaagtaaaaaaaaacatatatagcatttaacctgattacacacgtgacgccgagtagagatgcatggaatggtgttggttgtctgggttgggctgggttgggatagggaggggttgcgttggtataatcggatagaagtgtatgatactccctccgtcccataatataaaagattttgagtttttgcttgtaacatttgaccactcgtcttattcaaaatattttaaaattattatttattttatttgtgacttactttattatctatggtactttaagcacaacttttcgttttttatatttgcaaaaaaaatttaaataagacgagtggtcaaacgttgcaagcaaaaactcaaaattccttatattatgggacggagggagtagttattagtcatgttgaattggatacagacaacatataacaaacttaaacataaataacgtatcaaaattctggttgaaacatcttcaatttttataatagtgatacgagttattttttttctcattttattatttttacaattttagtatatgagagatttcttggttgctttccttctcttcaggtttttctccgcccctagagcgagtacaatagcaggctacaagtcaactgtatgcacgcatgttgagaagagaagagaagagagagaagaaaagcgggctacagatttatagccaactgcagcacagactcccatacgttgtttgtgtatgagagatggaaccatatattaatggtgtagtatatattatagataactattatatgaatgagttataagattgactatagatgaattagagctagcagttagctacactattaaacttgctcttggccgccgccgctctataacgttaaggtacatacgtacaccggcgaaaacgttaaggtacatacgtacatgttttccctgttcacaatcgcattccgtttagatacaccagcgaaaacgttaagatacaacggcgcgtgagaggagctaagtttatggcagccgcagaacttccccttccctttttccgcacttgtaactttgtaagcttctggtcagaatgtcagatcctcttggttaagatatttgaatcgagccttttccagatttacttgcgccttctgtaacctataaagctatctaatttcaccatctttgcaatcaaattctcgattttgtcactggcgcctcgcctacaagggttcgggatggtcccttgcaagatatttattttagaggaataggggaggaaccccctaacatggtataataattgatgaccagaaatgaaaatagatcaaaggtttccacgctccttcaaagcgatatttgggcttgtaaagtctgaactcggttgtgcttgcttatgaaggtaagaaagatgacgcttgcttgaccaaacagggcatccgctgacataatcacattgcatttcatgctgctttcaactaattccatatggatgtggatttcctaggtcaataaaagatagctgcatttgttttctcagtaactcatgaattgaatccatagtttcatactagttcagatattagaatttgcacaacatcatgttttatggaccactaaagttttaggtatagttaaggccacttcactattttcttttatgttatgcaatcatggcctttggtgttggttcatgatcccacaggaagtgctttcagtatactttctgagatgcctgaccttctcagattaatctttagcagcatgcaaattctgtaaaggtccattgaactatttgtcttgaatatgtgtgcattaccactgatcttgtaatagtgattatcttgcataaccagtaaactttgctgccaggtatagttgctgtgaggcagactatatcgatgatggctcacgagccactggcgctgtgctttcaagagctgctcggatgaggcaaaagctgcagtcttctttggaggccagtgcgatcgacattgaagatgttccttacaagcatgctgggcatacagctgtcaaggacaatgcgaatgagacgcattttaacatcagggtaatttcgcccaagtttgagggccagagccttgtgaagcgtcacaggatggtatatttttttagataaatgacctcttgactgatgagttgaactcaggacttcatgctatctcaattgtttaaatctcccaaagagtccgaatttcagattaggttatttgaggggctaagttcccgatttaaaaggctgcatatattcggttggatgtagaggctgagtaaaaaatacccttctctaaaaaaaatactatctcaattgttgcaaaactcccaaagagtcaggatcctgaatgtaaaatgcccacgatttgttttgaaataagttgattgcagcaatatcatgtgaccatgagtcaatgttcaaaacaatgatatgaaaattgaagccttatgtttcactgaattgtgcactacttttgttctcaatgaatgcctgtggccatgaaaatttgtggaaattatagtgagtatcgaattcacatacctgttcaatattcatcgtcaggtgagattttcctatgtggtacttttgtaagcatatatggatcttttgtgttggtgatagtctgttaggtgtatttccttcttttgccaattggtatattatttaccaatcatgatatcactgataaacaacaatgttactagttctggcagttgattttgctctgatataatctctggtgaaaactagcatagctgaataatatctatcaatttgtgtttgtagctaagattactaaagcttgcccagctgcatttttctttgtcattttgtggatacaacatgtttctgcttccacagaatcctcttgtagttcaaagtagtgatctatttaccatctaacttaccatcctctgcaattttccaagaaacatgtgaatatggtcgaactcaaaatttcaggcctcatttgaaacacagggatttggccttgaaagcaaatataattagcaattactttattgtgtggtgcacaatgtttcacttgagggtatatttagccaggctttggcaaggctgcaagactatagtaaacagtgttttggttgctacgtgctggagaatccatgagcatgagcagatctgctggtgctgttaccgctgtctttgtaacagttattgtcaagccttttttatccactgtctacgtgctgaaatgtcacaggctgcagagcaagttgcacatgcactaaatgtatgacatgcgacttccctgtggcattggaatatctgtaactactcaaattgacgaattggtgaagaattggtggacagtggagtcaatctttgagtgtgttagttcacgctaaaattggaaatttggttgaaattgaaacgatatgatggaaagttggaagtttatgtatgtagaaaagttttgatgtgatggaaaagttggaattttgaagaaaaagtttggaactaaacaaggcctttgttgtatattcaaccaactttgacaaattttgttaagtagaagagtaatgcaatgctgggacctccggtggtaagagcaatacagaaacttgttcttttgtcgagagcctttctgttttcgtttgaagccaagacagttcccctccactagcaagtagcttttgaagttggacttgagcagggactgccagacggatagagtgacaaaaattctgtaaaaatgtaaaatttgcccccatgcaggatcgaactacagaccttcagtttacaagactgacgctctaccactgagctataggggccgcttatgatctcataagttaaactgatttttactgctaaccatttactcctccagaacaatgcagctcttttttctattattattttttattgttttgaaggggctgcaagcctgcaacacagctcttgagtgacagaatatagaatagctcaagttacatccagaaaatcaaccgttcatgatgccaggctgccagctacttatagtgaaacatacctcatttgttccatcgatttttttcaggtgtaagtctagctgagcttttcaaatacgcgtgcagcttgttttttacaattaaaaaaaatcctacagaataaagaaagatgccagtattgtgaaatgctagcatatactgtaatttcttggagtcattttacacattacagtacatctccataggaaggtgacaacagaaatatataatagatccgaggagtaccaactccccgtgaggaaaaagtttccaggataacaaccattccttctatctgaatctttgcatcgaccaaaaaacattaattgacaacatttaaagaaaatacaatctatgaaaatgccattcgatgaattcatttgaacaatgcatagtttactctacatcttcctccttatgaacaagaagcttcccttcggtgaattcacatggcttgatgggtacagctaattgcttgcgcattttccttacaacaaatgtttcggtttcttcacatattgtgaccacagttcctttccgccctagacggccagttcggccagctctgtgggcatagtgtgttgagtctgttggaagatccagattaatcacaaggtcacattctggcacatccagtcctctggcagacaactcatttgtaactagaactctgaattcaccatccttgaactttttcaagacagttgaccttgcaagctttccaagatctccatgtagttcagtagctttcatcccacgggcctccaacttaaatacaacatccttcaatggcttggtgttgttcataaatgcaattactgtctgagcctccagagcatggatacatctccttaaagtgtccactttgtgttgagccttggatgtacaatagtaatgttccaaagatggtggtaagctgtcaactgcagcttgattcactgaatttgatggagagttggagttggcatctggctgggacagcacaggtcttggaacagtaattgactcaagtggaacaacactcatagctctaacaaggactggatcgtgaccccaactcctggctgctcgtataactgaaaatggtatcgttgcggaaaccaagatagtctggcgctcagaccgccttgcaagagggccaagaatatctctagatgaagtacccgatttccttcctacatgttcaagtattctatgcatatcttcacgataattgaaagacaaaagctggtcaacttcatccagtacaagaaagcggcaactgtgggtgtgtagcttgccggctgctgaaatttcagaaatacgaccaggtgtcccaacaacaataattggcttgttcttcttcaatgcttcttcttgcctcgaacgattagcaccaccaacaagttgttggacaagtctcttatcattagggcccaatatcttctccacttctcgcactatttgcattcctaattctctagaaggagcaacaataactgcctctacacctgatctcttatcagaactgtcttgttctgtaggcctcttcagagggcctatttcagaaagaatagggagaagataagcaagtgtcttccctgagccagtatatgattggataactgcatcgtgcttttgtgaaatgataggaatagcagcagactggacctcagttggagcagtaagaccttccttgttcaacctatctataagcaaaggtggcaaaccgagttcttcaaatgattttgcagaaaaaagagattcatctatcttcagagtcttcttcagtactgctgatttcggcaaggcactctttactggtttggcattgaatgaagaaacttttggtttcatattaagagctgaagcccttgaagatggctttatgcctccagtacgtgttgctctttctttcttaacatattcaactttgttttgcacttcaagactagctagagttagcggaccactcttatcttccacagtttgaatatcatgccaagcggtttggtgaaatcttaccactcgtggaagtgaaagcattctgaatggaaggtgatcaccaaggacgaagcatgaccgagaagatgccaatgcaagtacatgtcgatgcacttggccaacagttagccgcatctgtgctctatttatcaataccagttttaccacagccaaatatccttccttccaactaatatcacaaattcccgaggggatgctcttggctgtgcaaagaatcaaacaactggatcatataaactgtagaatttccaacatgcatagttaaacaaagaaagacacaagaagtctgtctgtggtcgcatggcatcaatcgagttgactcacttctagttctagagtacactctagtttgtggtggtaacagattaacccaaataacgagttctacattcagtagttgctggcttggtttaggcttcaaatacctccaaatttcctatataatacagcccaaataatgaacagtaactaaaatttccatgtatcaacccacaaattcatatggagcttgacctggatggacatcatggatagggataacagaaaaaagaaccaaatcagttcaagaagtttggaattcaccaccaacaaaaagaaatcaatccaggtccgttggatctccggtccaaaccagacaaccagtgggaactggaagcatagaggacgtaaccgatcagcaaaggagaagaagagagagagagagggaggcctcacctccgagccccagccggcgagctgcacctgcgcgcggggcggacggatactccgcgccggagactcggagaggggggagacgcgggtttagggcttagcctgaagccggcggctagctgacgttcgtctatccggttgaggagaagagctcgtagtcgtatggtcagtgtgtcaggcacacgggcttcgccgaggactcagaggccggcccggcccagcccattaactggtgccgctagcccagattgtggaagcgggcagcagcagcacggaggtggccacggcccacggagagaatatcaggtgctacggaaccgtgatgtgtactgtgctaccaacataaaaacaataaatctatgacggaatgtgacatatcctaatatattgaatcatatagtctatttaaattcgttgtaatagaatataaaagttctaaatttgtttttctgagtgcaacaccataacatgtaccttcgaaaaaaatcatctcaaaatacgatgttgtaatatcagaatattttacatttgtttacgactttttgatgtacttcccgaggtttcaaacctcaaatacgacgttgcatctcaaaactaacttttttcacatttgtttacgtggttggtagcatattgttctgttccttagcagctgaaattcttctcggtggccacggcacaggcggaaacggggaaccgaagcggactgtgtggcggcggtggagcagcgccggcgacaaagcacggaggagaggcggcgccggtcgtcggagcgcgtcgatggcgaccgtcaggcgtcagccttgcaagaagacgataaaggctgaaaaaaaaaacctcgatggttctccgtttttttgcaaatttactctgatctaacagagtgttgacagccgaaaaagccatggcaccacaaatccacaatgtgtacgaataaataaatcagagtatatatcaacctcaagcagcatttccctataacgtgcatgtacagcgcacaacttataggtctagtttgagaagcttctgcagtttctcatggaatattcggctcacccaaagaaatccagattgtcgcctaaattctaagaaaatgtagttgtagaatcatgaactagaagccagtttctctatattctcaaaagctaactactaagtactaaccaacagattccaagaatctgtagtgtgctactttctacatagtacaggactacaggtacagcacatgagaattgaacagtgcacacctgcacattttttcatccacggcatcatccagttctacctcaaattgtgcaacacacgcccaaaaccaaccacaatatcaggtacattttgacatgatgagttctcaagttcttcggcgaaatctagaaaagaattatgggacgctattgatcgtcctaaaagaatatagcaacagatggatcagactcagataagctgccttcaaagtttaccttgcagctaccaggaaattgcagcccagcttgctcacagctctgccttgtgacctgagggcatgaccgaacatctaggtgctcaagggccatacaggattcgatcacattcctgactcctgcaactgtgatcctaacacagctgctgatcttcagaagtctcagtgcagattgaaatccatttgcatccatatcctgaaatgctgcatctgtaatttggtcacagcaccccacatcaatagccacaagaagtttacagttagacaatagacttctcagtgaggagtctgttatcttcaagcaccaatccattcttaagcactttagtctgctatagcaggcaaaagccagtgcttctatggacgcatcagtaacatcacgacatccaccaatgacgagtgtctccaggttatggcagaacttagctagtgcatgtatggacttatcacccactttgttgcaatccaacagttttaatgataccaatgacgatgaagagacctcagcaaatttacagactccaggatccccgactttattgcatttgctcatgtctagtgacttcatcttgtgacaaccatcagctagacctgagatccctgcatctgttatgttgttacatcctgcagccacaagatcttccaaatgtatgcaactttttgatagagcaatcaacaaattatcagttattaatctgcaaccagcaatgaccagctgcctcaagttttgacaccccagtaaaactgcctttagacctttgtcactaagctttctgcagtgggaaacatctatggattgcagagagggcagtctatctcctatttttgccattccaacatcagttacacctacgagacacaagagcggtccaaatatcagtggatttatcatcatatcaagggataataaaaacagtagtttcagacctaagcagagtttgcttgtttttaattggagtacaaaacaaagccactggtatgactaatagatgggtaatttatcaaacatagtaccaaaatctcaaatcttaactatgcattacatgtaatttcgaacatccatctagattcgagaaaagataaacaccaaaggcttcagtccattctctaaattatatgcctaaagccaaaagaacattgagaagatgttgatttcgcttctgagtatcattgcattatgcatcaaaacctaggacagcagcttcatgcagcaatcgtacattcaagtcatagaaaactagcatatattaagtactatctcagcctctcagggaacattagaaaggatcacattcttagatgaataatattgttatacaaaaacacacctagtggggaattatatagctctcagctttccctagtctctattcaaatagaatgaaaactagcaaaactagagatgatcatcagtgctgcttttaacctttttcaaaagttcaggctatttttttccagaaatgaaccaacggaggctgtaaggtagttaaaggtggcgttcctcttcacaatgggcggcatgttcttcggcgaacaaaaccaaggatcattagttcattactatctacatctggtccgggagcgaaccatatgcagctatgcatcagatgtggtttacaacgttgcagagttttttttcccatgtatgcaaacagttctgaattcacaaaactgaaatgatacaagcaagacatcagcacaatgccatgttggaaaagaatgaaaagcatgaaggttgagaagaaagaagaacagtcgatctcgattccaacaagcttagcagagacaagaaaaaaaaggaacaaaaaaaagttttacctttctgccatctagcagatggaaagaaccggtaagccataaatcctactattcagtaccctttttctgatccgaattcccaattgctgtttgttaatcgagacggacaagcagcgttgacagacggctacagtcgtacagagattaaggtcgcacctttgcaattctgcagagcgaggacgcgcagattgcggaagcccccggcgacgacgtccaggtcgtcgtcgatgacgccggggtagaacgagcgggacggcgactgggagaggtccagctcgaggatcccggggaagcgcgcagcgaggcggcgcagcatggccgggccggcgcgcgcgcgcaggcgccgccgatcggagctctggatccggagccagcggcggcacacgagcccgaacgcgtcccgctccgcctcgggcaccagccgcgccagcaccgcgcggagcacgtcgtcggtgagcacgtcgttgatgagggcgccgccggcgccgctcgacgatgccgccgacatgggcagtgctaggagtagagagcctccctctcctctgcccctcccctcttctctctctctcctcctccgatttttctcttttcgtgagcagaagcaggatgaggccgcgtgactgaggaagtgtgaggagtggattttttttttcggggaaaaggcatatattacttagacacggcgtcttcacagaccaaccgtgaaatgaaattacagccattcccagtccacagaccggacaaagaatcacaccggactttattcgctaaactatggccaacccggttttggctacgcagagccttacagatcttgactttctattactgccaagaagctctttcacctctcttataagatacgctaattcagagatatccttctccttggactggatcatttgtattgccaccaaacaatccgtttcgagcacaaacggcaggaaagtccattgtaacgcaaggacagctccttctttgcaagcaaggagttccgcctcaagtgcgttccggcaactggccagctgcttacaggaagcagcaatcacatttccttccgagtagggatggcaattgtgcccgtttgcccatttacccgcgggtaaaaaccctattagggttgggtttgttctctattttatacccatggatatcttattgggtcaaaagctatgcccgatgggtaatgggcatgggtatgggtaatcactacacatgcccgctttgcccgtttacccgcgaaatctaacttacatgtaggctaggagcaaaatccactagaatacataagccacgttctttgttttctacggtttcccttttatttcccttattatttctctcctcttactctatcgccgccagaggagagacacgacaccgaggcggagaatatttgatgttttaagttcgattcgaacttagtagcttgtagactttttgttccactgcttttgttgtggcgggtaaacgggcacgcccgcgggcataaggcgcccgcgggcaatgggcatgggcaaccattcttacccgtcatgtagtaatgggtatacccacgggcacaaataatctcacgggcatgggtatgggtaggcactacccgtgcccgtcgcgcccgattgccatccctacttccgagtccctaagcaccacttcgatacctccagtccccgtttgtgcatcatatgacccatcaacattaaccttcatccaaccttgctgcggcttctcccagtcggtagtgcttccattgtacagtctttgctgactatccttcttcaaaccccagtaattgatcacatgtttgcccttcatctgattaacctggggatgctgtttgatttccaagagtattgacataactcagcaggaaattcttagacgcttcaatcgtgggtgcagacttcccatgcatgatttcattacgactaaaccagttccgccacagcaccatcaggagcagagaacgccctgaatccgccaggttctccaggcaatcaaacaaccaatggccataatcagtaggagctaaattgtcggaaatgaaacagtgatcctcctacaaagcctgcaaaagagcacgagcaagtgggcacctggtgagcgcatgtcttgtatcctccttctccctgccacatataacacagatatctgaagattacatcttccttttctttttattctccatagttgctaaacagttagtagctgccttccatgcaaagattttaaccttctgagggatattacatttccaaattaggttacaagggatagttgtggatgcagcacttgaactagctctctcctccatttgctccaacgactgtgctaacttgtatgcgcttctaacagaaaaccttccgaatttatcagaatgccaagcaatgaaatcctcctcatctctagaagaaatcagcatctgtaagattacctcagcatcaatggggaggaaattttggttcacctttatagcatcccaagcgccattttctgtcaaaagttcagaaacccacttaattctgcaattacgtttcccagtgattggccttctggtaaaattgcgaggcacccatgggtctctccagacacggatagatcgaccatttccaattctccaaataattcctttcttcaacaatttaaggccatattcaattcccctccatccgggggaggcactgctcgcaaaacatgtatccaccaaagagccatttggataatatttcgcttttagcacccgtgcacacaaactctccggtgactgaattaaacgccaggcttgtctagctaagagggcttgattgaacaaccgatagtctctgaaacccaggccaccacaaagtttaggtcgggttagatgatcccaagctttccaatgggtctttctttctcctttcccagctccccaccagaaattgcgggtaagatttgtcaagtcgtcgcagacagagtcgggaagcttaaacaaacccatcacgtaaataggaatagcttgaatgaccgctttaataagaatttccttacctcccaccgacaaataattctccccccattggattagtctcttccacaatttgtcatgcaacggctggaatttacctttattcattcgaccttccggagttgggaaacccagatatctgtcctcaaaagcattactaccgatttgcaggatattcctgatgtcatccttgatctctgtcggagagacatctccaaacatgatcgaacattttgccggattaatcaactgtccagtggctgcagcataatcacccaaaatgccgtgaatcacccgggcttgtaatctgtttgctttgaagaaaagcaatgtatcatctgcaaacagcaaatgcgaaatacaaggagctcggcggcacacatacaccggtgatagctcaccctgagcaactttctcctctagaagtagggacatgccatccgcaacaaacaagaataggaacggtgaaagcgggtcgccctgacgcaaaccacgcgactgagcaaatgtattcaaaagggatccattaaatttgaccgagtatctcaccgaggttatgcaagtcataatccaactaacccatcggtgagcaaatcccaatttatacatagcctgctccaaaaatcgccagtccacgcggtcgtaagccttcgacaaatccagtttgtaagcacaggcagcctttccctgattcttgttcttctgaataaagtggaagcattcaaaagctaataaagcattatcggtaatcaggcgtcctgggacaaaagcactctgattaccagacaccagctcatctagaaagggtctcaatctatttaccaagcattttgataccactttatagattacattacacagacctcgtctcggagctccatcggctgatcaatctttggtataagcacaatagttgtatcattcacaccagttggcattatgcctgacctgaagagtggattgtacttggccgctgctgcctttaactccttttgattgctttcaaatgtttgttgttggatttgaaaagatgaatttgcttgccaaaatttaaaatatattaatatatttttttcacagccaaaagcattgacatacttgtatatatttttcatgattagtaattgaaattagaacttctaaagatattattcattgggagaatagctaatatggtccctaaagtttcgctcatgggtcattctagtcagtaatcttttatattgtccaaacaagtcctttaaatttgtcatgtgggctaatatagtccttggtcccaccaaaatgccacatggacatgccatgtcaccttcctatgcaaaatctatatgatttgtccaatttacccttacgcacagaaaaataaaaaacaaaaggaaaaagtttaaaaaatatatggtatttgtaagagcaaaaatatacctcaaaagggtgaaaaaaagaagtatttttttcctatggttatgtctaattcacccttatatttatttttctatgatatacgtaagggtaaattggacaattcatcatagattttgcatgaatgatgacatggcatatccatatgatgattttggtggacccaaggactattctaggccttatgacaaaggttaaggatttttttggaccatttaaaaggttagggactaaactgatcctatagagaaactttagggactaaagtagctattctcccttattcattgatagaataacagcttaagagtcacaaagtttcaacatttcgcacatcaaaagaaataacagcttaagattgatccatcacaaatagattatatggcgcacattatataaactacaagtacatgctagaatataacataagcataagcacttgcataaatcatgtgtattccttgacgatttgaactgctaatggctcgtccgttgccactaggaatttattatccccgaagacctgaaaccctagatatttgcaaggcttcccatgggtaatgcacgtcaatagcttgtacgtcatattgtcatcatcactgtacctctcaatgcggaacactttagccgatgatgggtagttaggctctatatttgtgttggccacgacatattgcaacttagatgttgacgatgatggtggcattggtaacaatttcagttggaaattagagatgtaccatgtcgaggggcggttgcacaaccagatgatgtccacaaagtcaatctggacatcggtcgacaagcggactgcatcactgactgttgaattgtgcaatgatgtgaatctcacttttgcgccctagagagcctcatcggtcctatggaacacaaaatgctcacaatgtgtattgccagcatagatgatggagagggcacccccaccagacctattatttaccaggaagatgtagtatttgtgttcgctacttagctcctcgcctccagcatcatacaccagttggggtgcatcgcaagcgatgcatgggaggaagatcatgataagcggcagaaggaggaggaaaagatgtttcatggctagacccatggatcaaacgatatgttttcgaaggagttgttgcaaaggcctcaatggcatgggtttatatggacaatgatatagttgctaacatttattatgtgttctccacataaatgcaatggaaccttattcttgcatgtaggaacatttaaaaggcatatatgtttgtggtacataaatgaaaaatccatttggcgcataataaatgagaaaaactttttgacatgtaataaatgaaaaaacttaagaacaaacaattaatatgaaatcgatatgtccacttatgagggttaacataatataatttttttaagtaatgtaccctataattaatgcagcaacatcattcatcatgaccattcacccctcccccggcccctcctcgcacacacatggtcagatgctccctcgaatcgcatcggattcacgtccccaaaaatcgtgttatgttcccacgatctcctctccccctctagcatcgtcctccagctagagccacacccgaacacactcgccccgacgaactctctctattatctgccatgcgatcccttccacccagtactcctccttccgtgaccatagctcacacatgaaatgcactaatgatatttaaggaatgcagggtatgacgactgatacaaatgtatacatgaacaccaaataagagaacataagaaagcgattttataatagttcggaccttaaggttggtaatagtcgtactccagcttatatgtttgatctagggttctctcacatcgagtataaatggggagcaagctagctattctagctagcctatatcaactaatctcgatgagcaagacagtgacttgaattaggtaagttatttttcaaggccgaaaatgcaatgtttcaattcgttgtcgatgctcgtcgagagaagaattaagatatttttcattcagtaaaaccaagttccttggttcatcaatgttacaaacatagagtacttgtacttgcaaaggccacacgtcgatctgccaaatcgcaagaggaaggaacgcgctctcatcaaaaattggtagagcagttcaggtctacgtacgtacgttccaacaagaggttgccgtgcagtagcccatacactttgcttttagtactatatagtgccacccacaaggtaggaggccggccagccaaataccacatgcgtgcaccgtactacatatataagcatattacagctctgagatcacctgctgcatgtacttgcagcatctctggtagctcacgaatcccatgaaccagaactcgaacccgtcgacggtggccacgtgtatgtacttctgctccggcttgtcggcgttctcgctcggccgcaccctcttgatcctcctcaggggcaccaccaccttgtagggcacccgggcgacgacgtcgccagccggggaggtgacggcgagtgaccggtcgctgcggaaggcgatcttgcggttggagacgaagagcatcccggcgatggggccgccggtggtgtagaggtagcactggagggccttcaccagccgctctcccttctccgccgagaaggcctgccggaacacgcgctccacgccgccggcctgcaggatcctcgcgcccaggctcagcttccccctcaccgtctccgacagcttcggccccaaggtcactgcacacacgcatggcgaaacagagcataggttagcaacgtgctcacgcacatgtttttgatcgctcaaagcctgaaatttaaacattcaggttgcatgcatgcatgataactcaccatgatccctgaaaccctgagcccgtctgcccagcttgttcacccagtggatcacctggagcttactgcctgcgaaacacaaaatttgaaacccgatcgttagcaaacatatagtacatacgtgcagtcatgacggtaaactataatcttgagagatcaaaggaggtaataacgtactgtgcttgtagccgaaagacgtgtacgggctcgggtgcgtcaacgagacggcgaggcggtcgccgtcgaccttcttgccaccgtccctcgccgtcgtcgcctcctcgatggcgtacgccttggaggtgacgggcactccgaccacatgggcgcagctcgacttcgtcatggctagctctctctccgcggcaccgcgcttacagctaagctcgcttccttagcccgtaagctgtaacgcgggcgagagagagagagcggaaggaggagaaggggggagggatagcggaggcgcagcgagcgggttttatagccggcgaggtgacgaaatctttagcggaaagggcagcggattcgtccccgcgcggagtcagcacctgctgatcggcgcccggaaaagcaagcggtccacgttcgccaaaagtgcccgagcttgagagagcttgctctgctttacgtgcgtggggctgtgtcttccgcttcccgatcgtgcgcgcgaccgatcgaccggcgcccaaccggagaaccgaaccgcgagcgaggcgcaggatattctctctttcggcagccgggagggtagccggttgattgaatttgtctacgtggtgatgcatggtggtggtggtggatggcttggcattgccactttggaaggggcagcccatgtgctcgcacaatcttgttgctccgggttatgggaaaaaaggaggtgggggcgccagggatccaggcccagggatcttaaacatattgagttttggatcgattgatcggtcgttagtcctttttattttttctgtagtctgtagagtacctgccagtaggcttttccaggaacccttttttgggtctcagaaaactgaagtagttggtagtgttcttatatgaacatggcaacgggttacatacggaatgatacaatgatcaatagatgaatggacggttctctttttttctttttattttttacgtaacgttcgttttttttccctggaaataaaaactagcttcagtatccaagtgtaattgaaggcgtgttatcctatacgatttattagatatcaaaatcgtctagtatatgatttagatgtctcgcctacacaaatctactggacaagcgcgtatacgatgatttatgaattatgatagtccaaatatcaactgcgtctgtcaaagagatcatgttcagatcgatcacacagattttagatttctcccctggcctgctgcggatcacacagtgaggccccgcgggtgatgtggacgcaagatgatccaacgtgtaaaacaacgacctttccagctagcccaaaaaaaaaaaaactggacaatctcatctcagatttttccagggacgcgcgcaaccccaagtgcgcaacagtcatcgtagaccggtgcatatggtctccttttccatccagttttccctcccaatcgaagtctccatccactcccatcgatcgcctaccattccgcccaaccgtcgcgcgctagtcaccgcgcgcgcgcgcatccgcgtcgaggcccgcgcggcaccgagtcagcacggccgctcgctctcgctctcgctcgcccgtccgctccgctccgcttggctgcgtgcgcgactgcgcgcccgtgcatctcgctctcggatggatgcacgcgtgcgatacggtgtgtgatagactgacagggcaagtgatcgagtgagtggcacggacgcactgccgtccttgtccgcggtccatcagttgcgttcctcctcttatttttctttttctgcgtttcgatcggtttcgagaagtagcaggagtagtgcatttttttttcagtccttgtgatacaattcagtgcagtacatgttcggaatatccggagtggaaccatttcgatacataaatggccgtcctttcaacaaaaaggtgttaaaatcaagtgccatggccttctcttccagactgtcagtagtactctgatggcaccacaagacacaagttgttccaatcattcatttttgatgaatcagagctgaatttccatatttttttccctgctctttttttgttgcctgaattttctgtgtcctgaatatccaaagcctgtatatttatctctgaattttcagtctgttcttctgaagttgtgaagtgagtgttcctatatcctatcccactggcgctggtgctcctccggtcctcactgtagtggtagccgagccgataacttcggaggcaagagataaactgattcgtcgtagcttttgcctcatagtggggtgaaaaccatgaaagggtgtgagctgatcgaaagcccatctgatccgataagcggtagcagtgcgaagattccaaaagaggatcgcccgatggtccaatccgacagggcaaaggaaatggttcagctaaagatggaacgttgagataactgaaagaaaagggacggatcaaatgcatctgtaaaagccaaagtgcatatccccctgcttggccccgaaacaagacactgccattgggcgcttcgttgctaagccttcaagtatttgaacgctgctgcggatgtattggcattgccggcttagccaaagtcagtgctccaacttgacggattcagctgcccgtagtttatttcttgttcagaaagccctgaaatatgaattaatgtatctaagtggaggagaatctcgtcacaaaagtttaaaaaaaatcgagaaggagatttggtactgatgatgaaaacttagtttgcaagttagtaatatattgtgcaggtcggcgatgtgtctgatgatttgtttgtatgtctgacatgagattgtcctacctggaagaatgttctcctatttttctgaatgttgtctacaacaatttaatgacctgactcaggctaggttttcaaagaaagcagataattgaatttctccaattttgcaggctggactgtatattgtgtacagcaatttaatgacctgagtcaggctaggtttgcaaagaaagcggagaattgaattcaatctctttcagtcagatatgtaccaactgtagagatggtgtataagtgctacttcaacagtaaatgtcatgaacacacctgattctttcggtcagaattgaacagttcgtcctaccaaaagaatgtcggaattggccggacatcaaatcaaatcaataaataatcttaagaaatcacctcgatatcgtcctggatattccagtttatgtcagaaactatgtaatgatgaaatcctagccttacatgagtacagtatatgaaatgcatgttgatgtcaaaagatatctgaatcttgccagcacctcactgcacggtgtgaatttggaattaagcagatgaattgcatatgtatgtcatcaccatcatcaccagaacagggaacatgaacaagaacacgaagattatcgcgaaacttccatttttggcatatcttatcagaaattcgcgatgcacttatgatggggcttttgccatttgccgatttgcagccgaaaccatttctcatccaacttcttcatgaatttcaattccgcacacgccccacaaaacatcacatgccatcgcatgccctaatcaagccgcctatatctaacctgctggatgcaattgcaaaactgcatgccgatcgatcaatccaccagcaggccagccatggcgacccaacacacaacgacatgttgtgatcgatcaaccctacgcatacacaaatcctaacccatctaagcatcaccaagctagagtgacacagatgcacgcacgcacacacacaagcgtacgacacgaagagaccgatccgatcgagagcgagctccgccacgacatgggtgcgcgcgcttgcgcgcttcgtgcgtgtcatcgccgcgcctgcgcgacggcctgctccaggtggtgcagcgagcggtggtagctgacgaagcccatgaaccagaactcgaagccgtcgttggtgacgacctcgatgtacttctgctcgggcttgtgcttgttctcgctcggcttggcggccttcaccttccgcagcgggatggtcaccttgtacgggacgcgcaccttgtcgccgcccggggcggacaccgccagcggccggtcgctgcggaacgcgacccgctccgtcgacacgaacagcatgccggcgatcggcccggccgtcgtcgacaggtagcactgcgacgccctgagcagcttctcgttcttgtccacggagaaccactgccggaacaccttctccacgccgccggcctggaggatccgggcgcccagcgtgagcttccccttgaccgtttccgatagcttcggcccgagggtcactgtaagccattggaacaacgacgagttcatcagtcttacttttccaaacacgtcaaaatttatattcttccgtgttgaaaaaatcaaagatgattgctcttaccatgttctttgatgccctgtgcaatcttgtcccccttcctgccatatttgctcgcccgatcggttgtcgtcgtcgtcgtcgtcgggctattcgcatctgaaataacacagaaacgataggatcatcaaaaacatgttctgtattcgtatcaagtttcacttgaacagatgaagcagaaacgaactcttaccgttgttgaattggaaggaaccaacaacgaaaccggcatgatcaggggtggtcgtctcctccgctgcgaagtccggctcctctatgccataggcggtgttgctcaccgggatcccaatcacatggtcttgactcgttgacccctccattaacgatgcttgcaaggaaggaatactgaagacttcttggttcgcttcgctaccttctgctccgttccctccaatttgcggtggttgtctgtccctggtaggctcaggttccaaatgccaagagggaaagcttcttttatagggttggtgcccatcttttcacccagaaagatccaaggcgtctcggtggctatctctaattccgcactttggaatttggaatggatggaacagccctcatcttctcatcatgatagagtgctttgcgttaaaaaaaagctctggtggctacctaattttcgcgagggcgtgggtccctcgcatagcttttcgtgtgtcatgcttttttgtatttgtgtgtggagccttttgtgaaagtcgctgtatttatcgagcttgtttagcgcaagtgcatatttattttgtgctctgcatgcagagacggattaggttttcggtgtccggcgaaattcgatcatgagatggtaccataacagaacggcttgaccgcatgagcaggaagaaaatgtgcaagggctggtacagctctgctttgttgcctgcaagccatttggaacgtggaagccgaattgttggtcgaaggtactttatggctaaggcctaagaccaaaatgctagtagtatagttagatcaaaattcaggccacttttataaccaaaaaatctccatggacttctatactctttcccttagtcctgaaatattagatatacaattttattacacggccttcgacattgtcctatacctatcttttggtctctttagaaattacagtgagacggtggtcggatgattgggagtcaaacaccttaggcactgtacggatctaggaattaatcctggtagggtttgatgaaggttcggtgttgttatctctttttatttgttgtctctattaagctccctctgaaagtagtactacctccgttccaaaataagtgcagttttacactattcacgttcaacgtttgaccgtccgtcttatttgaaaattttgtgaaaaaattaaaaacatttagtcacatataaagtactattcatgttttatcatctaatagcaataaaaatactaatcataaaaaattttcaaataagacggacggtcaaacgttaaacatgaatagtgtaaaactacaattattttgggacggagggagtatatttataccttatgtctcgttgtattcgagtactcatagagacattattggtagtctccagtttagtaggagtaatagtctagatgttccgtagcagcgtaggtttttcaaattaggtatagatcttcttatcggatcgaaatatgattcctaacttggaataatcttccaatggacgttaaaggctgtgttctttttgaaaaaaaaattctatacgaaaattgttttaaaaaatcatattaatccattttcttaaaaaaatgttaatacttaattaatcatgcaataatacgtgctttattttacgtgccgggatcctctagaacgcagcctaagtgttttatacgatcgtttaacattttccaatatcgaagttgtcgacgtttgaggtttcaactacggtatttgcatgatatgaagatcgtcggtaccagggtatatgcgagattaaagaaaaagagatggagacaagtatttttatacaggtttggatcccttatcaaacaggtaatagctctactcctgttggctgaagccggtgttgctctttattcacgagaaagctaactcgcgcgcgcgtaggcggcgcgcacacggagggattaatttttttgggatttttttggtgctgtttcttttttctttttggatttttttcggtgatgcgtacctaatccaattagttttcgataataaccataattaaggtaagatttgtagatttgtcttttttttaagatttttttaagtagcaaattgaaaagaaatctatacgtgaaatcaaaatttgaaaactttcaactcaaaatttgaattttttgaagtcaaattttgaaaacattaaacttttcatctcaaatttgaaaaaatttcaactcaaatttaaaactttcaatccggatttgaaaacaatcaacccagatttgaaaacatttaacctaaatttgaaaattttcaacctagatttaaaaactctcaaccctgaattgaaaacttttaacctaaatttgaaaaactttcaaccctgatttgaaaaaatttaacctaaatttgaaaactttcagcccagatttgaaaacattcaacccagatttaaaaattttcaacacaaaatttgaaaactttcaagtcaagatttgaaatctttcacgtcaaaatttaaaactttcaattctacatttataaagaggtgtgtgaaaaattgaaaaagaattgaaaagaaacggcgaaataaaaaacaaaagcgtgcgccaactaaattgctggcgcgtacacgcgcattagcacccccctttattcatctaaattgcacaagtaaaatatttgggataacatatctagctgtcgtcgactttgcggcatagataactaacacgtagtcgacgacatggtagtcttcctcctcgagtacgaactcatcaagattagagatggtgctagatctctcttgtcggcctccgtaggcaccatattgggtttgtctaggcttatctctgatgtcaatgtttggcggcgtgtgttggtgtctattctgtcttgtgtgttgatctgtctatcccccctcctcttatggggtcttgtatatataaaagtcccattatccaagtagaactagggagaccaatatggatacaatccgagtagtacttatagtttccatatagaactctacttatcctttcttatccggaactccttctatatacgaggtatgatttcgtgtaagacttggtatatggtgggttccgccgaacttattcgattactattaaatatatgtggtatccataaccatgacagaagtgatatgacatattttatactctgacaacattattatccttagttcctcactaactacatctcaactattaccggaagtagcattaactctaattaacaaatgtgcatacccgcattaattaaaggttgagatggaagatcatctctagaaaaaataatatgggacgtgagaatgataaatattttatttttttaaaaaaatgaatgatagaatgataaataatctgaaacaaagggacgactaattatactggttgcgttctttagcggggggttcccaactccccacactcgttatccgcgcgcacgctttttaaactgctaaacggtgtgttttttttcaaatagtttctatataaaagttgcttaaaaatcatattaatctatttttgaaaaaaaaatcaaatacttaattaatcacgtgctaatcgctgcttcgttttccgtgccgggagtgccaacacaaccttacatttggactgattgtcatggacaaaattcccaagcttataaacaatacgacttaggctcccatcggttgcccatttggtcaaaatggcttatttggcttattaaaaaattaaaattaatttataagtaaaacttttgtagatttgtttgtagcgacttaaaagccaacattaacaaaaattacgttaaaagcatttcaaaatcaacttccaaatcaaattcaaaaattcaaattttggcttattctttggctgtttaggtcaaacgatggggctattattaaagccatgtttatatagattgagtagaatatcttttataaatcaatgttttgacttttaatatagttagttcattcgtttgtaatctcaaatatcatcacaaagcataatatctgggacaatcaaactaggcctatccgcctatgaggacgtacataccctgtgtttaggagtagagggtggtaacctcttgtgcatggaaaacatattacttgttagcactgaataattaagttttaacttaataaacttaaaaatacgttaatatgatttttttcagcacatttcctataaattgttttttttaaaaaaaacatctcatttaatattttggtattcgtgcgcgtgaaaagcgagtgaatgaggaggttggaaacttgacttgcaaacacagactaataagtactctctccgtcccaaaatgtagctatttttagcacagtgtcttgtcctaaaataaggctatttcttcacctacctcctcctctcaaccaatcacaaccattcttctcacatactttctcttttcaaccaatcacacacttcctctaatcattctcatctactttcttaatatccgtgccaaccttaaaaatgacttcattttagaacggaggaagtactccttttgcattcctccaaataaaccggtcgatcgactggccacagcgagatcggcatcgaatcaaaatcttggctcccaatccatgtcgtccccgccgtcagaaagccacgggccggagacgacgacacgtgcccctgacgaggcagcggagcctacctggcacgaacatttggaagggacaccgtcaccggttcggtcgctcgttcctctccgagcccctttgctctatggccacggaggccaccgccactagctctagtcagcgtcgcgtccgagtcacccgcccatttggaaggttttctattgacagcgctgcgtacgttgctctggttggctcaaccaacttgccttgcttcttttgtttgtttttttttactttaatctcttttattgtccttctctcaaaggatgcttttttgttcttgtataaaagctcgatgtttattggtggatgtacttgcatagttgcattatatatttttaaagtttcagggtataactaaggtaacaatgcaacttgccgtgaatgaaatgtgcgtgacttttggatttggtttactaattgggagaatgccaaaaataacatgatgttctagagtgcttgatcggatcttttttttttatttgctgtttactggtatactctagagttacgaacttattatatttattggcttattggctattgcgtgttgcgtaggaagaatgtagagctacacatctttggcggttgaaacttgaaagggtcaacgtgaacttgttttgttgctgtaccatgttggccgtaagctgaaagaaatgggaaaagaatcgaggaatgcagagcatggaagcttgaggcacactcaatagttccttgctgcatctttcaaccaaggaatcacataccaatgggcagaaagattaaccaacgaagccgtgacggtatgcactacgattaaaggtacatgtaggaatttgaagacatctgaaagtctaaatcatcaggttgaactttaaaggaatacaagtcaactacgcaagaagcttacacagaatcaacacatggtcacggtcgtgaacaatccatccattggccaagatcagggttcgatccccactaccagttcactgaagaagccttttattcagaaactggtggctcaatttcagttcagagctaagcaatcattttttggggcaatattctaatatgtaaccaagtatataattcccaataactcatataaagctatatactactactagctagagattggcactttcaagataaagtgaccaacttatcaatcagcaaccagtagtagtaagtaatctaggaaacacaatgacccatgggaacccctaggaacactgaccatccttttgcactgttctttccttaatcaggaggtgcaagtgatccatacaaagccattggtggcatcaaacccctaaaccggtcggcctggctggatgcttttcaattccctgcatccaaatgctcgtgtacgtgcaggtgatcgatctaaagaagaagcttttgaaattgacctccactgacttccacggttgcagtctgatggcaaaaggggcttgtgcttgttgtaaagcggctcaaagcacggcagaaagcaggagagatacgatcacttatatagattttaagtagaacgggctccacccctgctccagataaggatggatttctgtacattggtgtagcataatggtgtctgtgattaacaaaaacgcaagctttttgggtaggtttgtgcgttccagtggaaaggatgtgcgtgcatggctgctccctgctgccaattagcatcgagacagtgcaaaagattattgcaaattgccgacaggtcatggtgggctctggtcccggctgaactcccccgttgccgtttgtgtcactgctgattcagctacaaaactgagctgtgcatttttagtttagtttagttattttttgctttatgtgtgatctagcctttgctgatcgttcgctcgctcatgactcgtccacatgcagcgcacgctctagcaggtccagtgtctagatcgctctgccgctgctaagcaaactgcgtgattatgtcggggggtgagacggcgaccggcagttcctgcagtcttggccttttcagtgtgagagctctgactgggcgccatatacaaatcagggactcagggcataggccaatccagtaggggttttgcaactctgaataggttgcgaatctagtatggccccaaacctccgatcttggccaaccactcaacgaaaacatatctacatatcttttctgtatcaatcatatatacttagacatcgcgttactgtcggatgaagacagactaccatctactggccgggacatgaaaagggtccaaaactaaaactgaggttggtagtgttcgacataacaaatggccaaaactattggtttaacgctgtcttgggttgaaaatgactcgtatacgttgcagtagcaaaattctagcacggccttcctcgtatttcggagtttggagtgcacgaaaagtcgcaggaatcagcagataacttgtgtgctagttctgtcagagcaagtaagtttaatagtatagccaactactagctccaaattttctatagtcaacgtaatagttaattcatacaatagttgcttactacattattaatatatggtcccacctgtcatacacacattacgtcttaaagtccgtgctacagctggctatagatctatagcccgctcttcttctctctcttcttttatctctttaaaatatgtttatagctggcttatagtctactattgtaccggctctcaagggtgtttggtgacatcgtacagcagaaatacaccgagtgcaccagcaggctagggaacaaatcagatcaggcagccaagttcggttggaaaagctcccaactagactgtgctcccccaattgttcgggctggcgattctggatcttgcggtgtttaggtgtgcgttgcctcgcgttgtgacacctgggatttttgccgtccagaattggagtgcaggttcctgccttgacctgcacgaagaagaaccgaatttaacctgctttgcgtgcacgacgtccaggtatcagtgccagatgtttgccattcgcatgatcgctggttttgttcgaccgcgggggctgcatggtgtttcagtggtgatgtggttcgacataacgaaactgacgtgactcggggtggtgtttgaaccaggttctagaaggagtacgatcttagcgtagccacgtaggattgttcccgatcccgtcgatcgaatcgccaccgttggttctactgggccagaagtggcggacagtaggctcagtgattctccgcctccagtaggcccagccaccatcaatccccacgtcgaattaaaatggaataagttcatcgagcatccctcaactttgcatctgagtatgtatgacatgcctaatccccaataccataaatctccacccctaaactatataaaaccatacaaatgagatcctataggaatatagatatctggttttactgacgtggcatactagtcagcaaaataaaaaaaatatgggatccacatgtaagtgagtaatgtggggttcgcatatctttcttctctcttctcttctccgattggatcccgccgccgaccggtccgaaccccaaccgcctgcctagcaccgtctcctccagtgggcctccccctggatcctggggcatccccatccgccattgctaccgtcagggggatgaggcccacgccgcccgacgacctcaaggcccgacgcaccgtccgccaccggtcgcccccacaacgtcagccaccttcagctcctctctgactgtcatcgacgtccgccggtgccatcctttgctctacaccatcgtccatcggcaccatcccgccaccaggggtctcaacttcgccgacacggcgccccaccaccgggctcatccgctgcgctcctccctaggccaccagtgcactcttccccagccccgcctccactagtccactggcgtccgctgtcaaggctgctacctgcgtcgatccagactcagatccgagtcgacgtcgccgtgaacctgggagggagaggcggctggccgtactggtgggagaggagaaaaaggaggccggcgagcctgggctttagcacatgtgcgtcgtcgggtgtggcggcagcggtgaacatgggcggccgcctctcccttggtgccaagctcggcggacgaggtagtaggccgtgaacagggaggccttggtggctttgcgaggagatgaggctctgacgaggccgacgagcgcaccgcacatgctgtgggatttcaggatggcctctagggcatggcagtcgccggaggaggcaagctcgtggagcacgacggcggcgctcacgcgcgaagccaggatctccacgagcgcaccggagatgatgttggcctacacaggcttgaggcggcgatggggcctctcgaggcgggctcgctggacgcctccccctctctcgctcgccggccgcctctcccccgccgcccctgtcctcccagctcattgaaaatgagaagagaagagaagaaaatagaagaaagaagatatgtagaccccacgttactcgcttacatgtgagtcccataatctagaagatatgttgactagaatgccacgtcagtaaaattagacatctatactgttataggatcttatttttatatgattttatatagtttagggatatagatttctaatattagagattagggatatcatacagactcgatgtatgtaaagtggattaacggttggtgaacttattccaattaaaatcatggaccggccgccaagttcgttgcggccgcgaggacctaggagtcgcatccggctgcttcgaggccgcaaggaacgaccagtgcgtcactccccgacgccgcgggcgtgggcgtgtaacgccgcgggtcgttggttgcacagcctggaccgacggagaggtgactaggtgaattgtgacgtcagtttcgttatgtcgatgaaaccaagcaaagcatttgcaactggatcaaacttcagagtctacagaaaatggtacacgttctttacgtaaaggctcatctgatccgaccacaggtactggacaattttgtaaagatcatatgatttttggataaagttcaagtggggatgtagctcaaatggtagagcgctcgctttgcatgcgagaggcacggggttcgatcccccgcatctccaattcagtttttctttttccctttcgcatctgtttttatctcttattatctgtgctttcccgttttaatatgccatgaacagttgatggctgtactttcactactttcccgtttcaataagggcatgtacaaaggtagagtcaaatagaagctctatatcatgtagacactagtatcctacaatagttagagataatatggtctctaatcattaatgtatctaaatattttttcttactcttctttcctttctttcaccaccatgcaacaaaatttgttctaataaatgctaagagtcgactctgagctgttgtcatgcataacaaccatactcctttatctttcttttatatcatcaaatttacttatatggtaatagagagaccactaataaagattgttgtacctgtgctaaggcatgaatagtttgagcctgaattagggattgccgcgttccaacaggcagaaatcttcgtcaaacattgtgacccggatcacgtggatcacatcgctcgcccctgaaaaatactgttatcgtcatcgacgccctgcgtgcacggtgcacccgctctaatcgctaatcctcgcggtccatctgtactgtacgcttatcttgtcataacactgacatctctctcacgaatcgcctaaactaatgatcaatcagttatcacacaatgtcaccatgtgaatgtgcagtacaacacgtacgtccctcttcattccttgacttcttctcgtaagttaagatatgccgcttctttgcgttcacaaggacaaggtgactatgcttgcacgactttccatgccacggcaacaaggatcaaacagtagtcagcaaaaatacgggtctataaatacacgacgtctctccgctggcttacacacaacaacatatcgcaagatcgatggcgacgacgaattgcctcctcgcgctcgcaatcgcgggcctcgtgcttgtctccctcccaggactctcgcgcggcgacgtcgacgctcgccgcggccgcgagctggcgggcgggtgcaacccgagcggcacgctccgcccgagcaggagccactcgtgccaggactgctgcaaggccggccggtcctacccgacgtacgcttgctccccggcgaccaccgggagcaccaaggcggtgatgacgctgaacgacttcgaagccggcggcgacggcggcgacccgtcggagtgcgacggcaagttccacaagaacacggagcgcgtggtggcgctgtccacggggtggtacgccaacggcaggcgctgcaacaagaacatccggatcaacgccaacggcaggtccgtgctcgccaaggtcgtcgacgagtgcgactccctgcacggctgcgacaaggagcacgcctaccagccgccgtgccgccccaacgtcgtcgacgcgtcgcaggccgtgtgggacgcgctccgcatcaccggcgaagacgtcggcgagtacgatatcacttggtcggacgcatgagatcgaccggtccgtgatactgttccaaatccaaactttttcatcatatcatcgacgaagagatcgtgtagcgtactcgggtggattaaagtcttaataacgagtacggtcacatccgaaaggaataaatattacaacgtttaataaaggacatgggcattgctacaaaaagagccctaccatggacttccgagaagcaccaccgtgcactagggtgtccacacatttcagccttaagattactggattattttttttttacctttgaggtcttttttaaaaatttatttacaagcaaactcttgaaaaaacatattccatgaatgaaacattttcatgatgccagcgtcattggtgtcatagtccaacctaacagtgctaatgatgttggcgttatccccctcgcacccctgcagaccgcacaagaccagaagctaagtcactaacatgaaggaggtcggcaccaatgtcaatggcgctaagggcctatctgtaaaaaaaattacattggcggtaagaacctataagtaaaaaaattaaaaatgatctaattttaattaaaaatatctacaaatatatcctcaataccaatgacactaacactaagggtgtgtttggttgggcttttcaacaaacttttgcttttgcaaaagccaaaaatcaaccaaagggtccaaaagtcactgctgcttttacccaaagccagcttttggtgtagtacaaatcaaaagcagccctccccttgctttcagctgcttttgagagaaaaaattacccacctttgccattacacaaaaacgattcgcttgtttttttttctttctcccatcggcatagctcctcctcctcctcacttcgccgtcgccgtcactcctcctcgccctgccgccgccgctcctcctcgacgagacgtcgccgccgccgccgccgctactctcgtcctgcgctggcccagatccgccgacgaggaggtgtaggaggaggaggaagaggagtacgaaggggaggaggaaatgaaggacgaggtgccggtgtccccgccgccgcctgaggccgactacaccaccgcccgtgtcaacctcccctctgccgccgccgaggacttctccgccaccgctgatgtgaccatcaagcatatgcatgcatccaagcatgagaaatataaaacatgaccaaagaattcatcgagtgaatggaggatctacaagatatcaaaattcaatgagttttggaatccagttcggccttcggagacagcactgacttcaaacggacctagcgccttcatgccaactccgatttgggtgatcttagacttcgtggaaagcttatctcgttacctttcaaacgcatccggtctcatgtccaaattcatcttgagtcaacgggaatcgccaaaacaagacagtgttattaccgaaaccgaacttgggccttgggccttgtaatagactaggcccatctcggaagtgtctccctccacctccacgaattagcacttaaccctagctttattttcctctataaatagctttgtacatcctcaaaaacatttgggttttgtttagttgaattttaccaagtgccattcaccttgtctctagtcctcgttcgattagtcggcgactattgattcagagcccccaatagttggtgtgttgatttgccgggtcgattagatctaccacttcaatcgcaactatttctttgtgctaattacctattcgcaatatttagattgcatcttatcttgttcttgcaatgttctctcgtttgcattgcagggatcatcacccgcgcgtcatggttggtacgacatcgtttgtggtgtagcgattgcatggcgtcctggacttgttctggttggtagccacgtcgtaaacgtcgcactcaatcaaagcgagagttatcccctcaccagaagatcgggccacaagagagagcgtcatcagttggtatcagatggtatcagagtatcggttgcctggtgaggattttagttttatatatttattttccctacccattatctacaaattgccacaccactttttccttcaccaaacattagttttgagccttgcaattgttattcaattttgctttattgagttttggtccactgttgtgtcaagtgctggttttagttctagtttcgtcttggtttgagttttgcatcttggttgtgcattgcctgtgcgttcgagcagtggcggaaccaggatcttcggacgactagggcccaaattaaaggctaaaacttgccatgacaaatgtgcaacaaccacatttggttctagcacaatacgatcttgcttattgttactagccatggtttctgctgaattaggcattgggatggagtcattggtttcttccgtttcctgagttgccggagtggattcatttgaggactggacttgatagaatgattttattgtcctacttctcttcatctatgaattcaaaccaaatctaattgagtaatgtgatgtactaaagcagtaaagctataggtttgagatttcagattcgagaactgagaaaggaagaagaaagagaacaaaaaaaaaaccactgaccttccactcccgcacgaccgcaagccaccgccgcacgccgttcgccgccaccacacgcccgcacgccgccgccaccacaagcccgcacgtcgccaccctccgttcgccgccgccaccacaagcccgcacgccgccgccgccgccgcacgacccgtacgcctgcagcctgcaggccgccacctcgcgcagccacgccgcacgccgccgccacacggcccgcacgctgcagcctgcaggccgccgcctcgcgcagccgcgcccccgccgccgcacgtcgcctcgcgcctccccgccatccgccgccctatcgagcgtcgccgcgcctcctgtagggagagatcgaagagagaccaagagacggagagaggcaaagagagagagagcatgattcggattcagtcggcactcggcactgcaggctagggttttcactggttagtgggctaatgggcttcggcgtttgctatttcgtgggctgttcggtggagaaggcgttttttttggaaggccgagtgtagggccggcctgcatacgagtggggctgggccaagaatatatgaaaaaatcggaaaaatcacaaggtataggtattaattttttttttcacgagtagggcccgggcccaagttgccctaggcccagctccgcccctgcgttcgagctcggttgaaggagaagaaaacattagatctgatcattttttatcatcctgtgttagtgcatgcatgccgtggaattctggtacgttaccaagtaaaaaacacgtcaaatcaggaacctaatcttggttatctcgtagttagttcttatgtctctatccgaagtgcatgtgccaaaaaatagcaattcccagtatttctttcttttgagctgccacgcacaaatagaaagtatataaattatcattcccatattccttgttccacaaaaataggaggtatccatccttttctcctctgaccgaggcatgcatgcaacacaatcgtgtatatgtgcttgagttaattactttaaaaaaaagaagaagaagaagaaaagaaatagagaaagggcagaaggtgcaaaaaaaaaaagagtgccgcacaaaaaaaatcagaaaaaagaaaaaaatgcaggaaaagaaagtgtggaattttttttcgaatcttggagagagttgcttgatatagcgagttgtgttttgtccaagtatgatcatttgcttgcttaagctaggattgagtctaggctacgccagcaattttgactagtactttggactattattcaatttcgcaaatctgtttgatttttgctattccttgtgatatagttaagcctaccaagatacacatactactaacctttacaggtccggctttacaatcgctccactcatcaagcgtgtcattgtgccacgaaccagccacggtgattgacttgctttgcattctttgagaacattataagaatttggtatatgcttgagtgttgagtgacttgcaaccccacaagcaaaatttgttgttaataagaagttacatgcatctgtttattttccttgtttgctactgacaatgacaggtgtgtataaagagaacaggattgagcatataaaacattggctttcacatcaagaacaggtacatgatgaggtttatgaaaataagatattgttgccttcatttgttggtaagtttaatcctagggactatattgattgggagttagaagtggaagatgaacttgaatattatgaattgtctgaggaacaaaaagttaaggcagcaataagttcttttacttcttttgcatctctttggtggagtgatatttgtcttgtcggtaataaaccttattcttggaatgacttaaaaacaatgatgagagctagatttgtacttgattattatattcgtgatttacaaaagaaaatgcaaaatttgaaacaagggaatagaaccgtgagagagtaccaccgggagtttaaaatttgtatgttgtacggtgttatagagtagtctagaggagatacaattaaaagatttttacatgggcttaatttaaaaattcagcataggcttgagaataaaacacatagccatctttttcaattacttttgcatgcttgcgatattgaaagtcagattgagaaagaaacaaaaatgcctatgatacatgagaattttcttgctccttctattttatctaatatcatgcaggaaggtaaaaacaattttgaagagaagaacaatgaagcacctaaattatgtcaagagagcgtttcaggtaatttaagtgatggtcaactggaccaaggtaagaaagattgtgctatgctacaattgtccactaattatgctatattagagcaacctctagtggaacagatttctaatttgcttttatcacaagctaaaaattcagattgtgttgatattgataatgcttgtaatgaagaagagttgcgcactgcttcacttatacacatgccacaactagtgaaaaaacacgttacttatatttttgaatatttggttaccactcaaaataaacgtgtctttgttattgctgatgaccaagaagagctgaaattattgtcttctttatgtactttgggttatatcgaatttgatgttctttgtgatctaaatgccttagagaagaaaatttatgattttccatgttattcttggaacaattatcatgtcattggtaaatataataatagaggatgttatatggtgcatcgtgtttatatatgtttagatatgaatcctcctttaaatatggaaaaatatgagaaccaaatggatcgtacaacgttgatgctattgggataaatttacctaaccttgttttgaagatcgatgacaatattcaagaaggggagtgctatgcaccattagattctatagtcaagtctcactatcattttaagacatattcattcagtaagttgagttggtttcctcactaccgctcctcgccgccgctcgaggccgaatccaccgctgccgaggccgactccgctgcccaacctgagccagcgccgccagacgctgcctgttgccgccccttcgttcgccggccgtggaggtgggagacgaaggtggtgaggtggccgacggcggcggcgtcaccgccgcgcgtcctcctcctcgccgaaccgcagccgctgccgccgaggactcctccgccgctgcgcgcactgccgctccccgccgccgctcgaggccgactccgccacccaacccaacggcgccgctcttgcccatccccgaccggcgccgccagacaccgcccgccgccaccccttcgttcgccggccgtggaggcgggagacgaaggtggtgaggtggttgacagcggcggcgtcaccgccgcgtgtcctcctcctcgccgaaccgccgttgtcgccgctcctcctcgccaaaccgccgccgctcctcctcaccgagccgctgccgccgccgaggccgacgacgccgccgttgccatctccatccccttattttctatgtatgacatgcggggcccacttgtcagcgggactagttattttaaaagccacaggtgttaaagcaaactagctttttcaaaagccacagtccatattccataactacttttcaaaaagctacagccaacagctactttttcaaaagccacagctcaaccaaacacaccctaagtacctgcctataaatatttttattacaaatatgtcatttttcaaaaaaatataaatatattccttcatattagttacttggcttccgcgggtagggaatgacaccattatgctggaccacggcatcgatgacattgacgtcataaaaagattcatttctaaataagttttttctaggagtttattttataaaataagttttgtaagggaccaaaaggtaaataaatccagcttatgatatcttgctcgagctgttgggcctaaggccttctcaaaccagccgtttgttcatttggatcgtcactaatgcaatcttttcacatcagactagctaactttatggttattgttgttacactttgaaaaagatttggcacttttcacgtgaatttatagttggctaatccataaagtataagctaactataaattaaattatgtgaaggagagagaacgggatcaagaatataaacttactatacaaagttattcatacgtattaaaaaaccacaaaataaatgggaaagaaaaaaacccgaaaagaaacggggaaagaaaaaaagaaataagggaaaagtgcaccgtccagcccccctttccacgcatgccacgtgtccagtcgcgcatgcgggtgtgtgcaggccggggggtgggggggagtatagatggccaaatggaccgcccggcctggcatgttcgggcgtgggccgaagctagtcagactaacacggcccgaccaacacgccgggctaggctgtgcccccagcccagacacggcccaacaagactcgggttgtgccgggcctgcacgaaggcacgatagcccattgtgcttctctattaaataagtctatttttattccctctatctttgggatgtgtcttatatgactggaataagtctattttgtatacctccagtctttgggttgtacctcaaatggccgaatcaagtctttgatggatccctcaacttttttttctttggttgtgcaggctcaccgtgccgagggagtagcctaaggcacgaccgtgattggggcgggccaaattgccgtgccttgggccgggtcatcgggactcaggccatatagccatctataggggagagggaggggtagcgtgtgtttgaattgcctcctttgcacttgcaatcgtaggcctcatgtttgtctccctccctagcctgtctcatgtcgtcgatcaaccctcgccgcgggcacgagctgtggcagccgacgagtgcatgccgatcgcgtggcacggaggagctgaagccgaataagccagacctacccaacgtacgactgctcaccgccgaggtcgacctctaggaccagtggcggatccagaaataaatagcagtgggtctgagcaaactagatagagttacagtcccccctcccatctacatatggtaaaaaattttagtgaggtcttcgtggggtctcttataatcttagtatagtaggggctcgagaccccgccgcctccatactggatccgccactgtctaggaccaagcgagtggtgacactacacgactttgaccgcctagcgccacgatgtacatattgtggacatgagagagtgcaacaacagattcaatcccgggggtttcgtggttgcgctctcagggggagggagtatgaccactgtggtgcttccacaagtatatccaaatctacaacaacgacaacattgtggcagccttggtcatcgatgagtgcgactctcggaacggctgcaacttagggaccggctacctgctgccatgcagccccaacaccatcgccgcgtccccaggcgtctaggatgcgctcggcctccgcgccaccggcaacgaggaccacgcgagaacaacgtcacttggtcgaacgaacactgacattatttgttcatgaagcgaacgccaacggacaaccaatatggttattttgcatataatcctaaataaattaattaagccgaatcttaaatacttttttattctaaaatataatctaagattggatagtacacatcctattattccgtaatataatactaagagatacgatgggctttgctgaaaggagcactccttacctttgagaagacacttgctggactccttgggctcctccagtcggcccattttcatgatgtcggaccattttcatgatcgctttggttgtgtttgagctgaatctgctgctccatgcatgttcacgagtgtccactgtccagaactggtatcgtgcatgagcgtgacagatcgtcgccgttgcaccccaacaagattcgtgaatcattgcgaacgataggccaattcaattgggcccgtttcggatggcagccttcatgccgtcagggcatggccgaacaagcaacgttgctttcgcggttgacgatggcagcgtgcgagatgcgatgcgagcaacgtacgtaggatcacgcctcatattcttacattacatggagatcacctgtcagcctctcagtggcatggctgcaattactgccgggatttgctttctgcccgacaaaaacgagttctgcaaagttcgagcctttcggtaaggaatggaaaattttctaggaggactccatttaggaattctttacaaaaatatttagtcctaggaaaaagggcatagaattagagttgacctagcagtaatgtttcagtccgagcagagtaccgtcaactttctcagctgatcagctcgatcgtagccctgccaagaacgattggactatactacagccgttgcacatcggcattcatgatttttgacgtcaggaaggtcagagcttacggagaggaatggattgatgggaaggcagattccttcgctttctctgcagtaacaacccggtgggttgtgggttcatgtcctcttcctgtcttgcctttcgcccaaagtgatttgtgacttcagtcgccgcccctatcaactcccctgtggaaagggccttcatgctttagctcggtttcagaattcagaccaactccgcttcaactttcttccaagcccggtaaccgcattaccatcttttcttcgagcgcggttggtgtgtttccttcatgattgaacgataggtgtattttttgaagaattgaagttctctcgaacgcagtagaaagaaaagaaaaaaatgataccactggagtaggattgcagagaaaacagatatactgacttcaaaacttccatcccagcataaaccagtgcctgaaaaaattacagtttctcgaattcttgcagtgcatcaagccaactaggtcgactgtagctggtcggcatactcttttgtcggttttcttttcatcgtggtatggagtaaaagaggatgggaatattagagcagttacaatagcaggctataagccagctgtaaatatattttaagaagataaataaggaaagagaagagcagcgggctacagatttatagtcagttgtagtacggactctaagacgcagtgtgtgtatgacaggtgggaccaaatattaatagtgtactccctccgtcaaaaaaaggcaaacgctgggtttccgtgtccaactttgactgtccgtcttatatgaaatttttttataattcgtatttttattgttgttagatgataaaacataattaatattttatgcatgacttgtctttttaatttttttcataattttttcaaataagacggacgttcaaacgttggacacggaaatcagggtttgtctttttttgagacggagggagtagtatataactattgtatgaataagctattagattggctatagatgaattggagctggtagttggcttatactgttaaacttgctcttatgtctcgtaagctttcgattcagtactaaccacttcacactaattcactaatttcgctgcgcatacactcgactcgagttgcacttatgacaggcatcggcactctttgccactcaacgctgaacgccaacgagaggaagaacatgaaagcaagcaccaaaacggcaaagaagcactctttcccccttgcaaatcgtggtgttagaaataatagtacagaatctgccttcccattcaccaaaaatagtagtactagctcctagttaaaccaagaagagcagagtacgcggccacactaaccacccaaacacaccgccagcttccgttaattacacgggcctctaagcagaaacgcactaacacgcagacaaacacacacaccacctgcatactgcgcggctaaacgccggccatgtcgcgtcggactcatactaggacgaagtccgcggcggcgcggccgtcgtcgaagttgagggcgtagctgagcgcgtcgtagtggaagctgaaccgggcgtggtcacgcctgccgccgcgccacctcccgcgctccgactgcatccgccggatcccggctcggagcctccagtagattccccggagcagcctgccgctgccccgcccgcgcgccaccgcgaccacccccgcctccaccgccgccaccacggccgccatttttgttagttatcccgtcgcccgctgcacacggctcgcggagggagaggggctcgatcgctgtggctgcgggctgtggcggcagtgtgaagtggtaggtttgggcaggcagagtgggcagaggatatggtggccgggcggagcttgggaaagcgtatataaaaaaacgatgcctcctttaccttttttcaacgctttttcaacgcctgtgtctcgctcggttaatgccgtgggacaggaaatggtgtactcgtcgtcgtagtagtagtctcgtagtagtacagtcgtactaagcgctgaacttcgctgccctagtgcgagctggcgttgcactgtgcgactaaaagaaacaggaatgttctaaaatctactcctactcccctgggataatacagtacactgaacaaactaaactagggtgtgatcgttcagagtcaaaattccgatacaaattaagacaaaaatcaaactttaaaaattgattttattttaagacagaatgagcactccgtgtactactcctcacgtcagtggagtacgcctacgactactagagtccgagaacaaacatcgatctcgtgaggtggtagtacttttgttggcgagtgtaggctgcttcagctgcggttgtagctggactgagcgcaggaacatgcagcgggaccgggcgttggattcgggacaacgggggatggactgtggctgcgtgtcacgtgggtgcgctgcgacggtgtagtggcgggtgtggattggcgagaatttcttgggctcccgagccgagagagagctgcggcttggattcctgggctatttttacgtcgtcctcagcaatagtggcatcctgcattcctgccatagaagttgtactggtgtttagatcgaatggtgtaagattttagtgtgttatatcagatattatatagggtgtcgtatagggtgtttaagcactaataaataaaataattataaaatacgttagtaaaccatgagacgaatttatcaagcctaattaacccgttattagtaaatgtttactgtagcaccacattgtcaaatcatggagcaattaggcttaacagattcatctcgctacttaagattaagatctttatgtggtacttacttaaaggggtggtgctaactaaggacaatttggcaagacggaactggaatggcagtttaagatgttgtttctgtataaaaaatgagaccattcaacatctttttcttgactgtcattatgcaaaatttgtttggagaatagtacagttttcttttggtttaaacctccctattaccatatctaagatatgtttgatggttggtttttggggttgacaagaaaatgagtaaactcatacttgttggagcatgagtagaaatgatatagtttttgacaaatcaccatctatctcatatatgcaggtaatattgaaggcaacatattggctccgattttaggtaaagctgcaaaagcgtgaagatgatggagagtttacgaatgttgcatgccgtaaactggagacgacggttatgcaaatatttgcgaaccatggatggagattcacaaatagacttgaataaatgtgtgctcattttcttagtttggtttttttattgttgggtgtgtttaattttatttgaacttcattcgttgtttgtatgattccttgtaataactggctgtagctctaatgagtaaaggccggaatatttattccattatctaaaaaaacaaattcgtctcgcaaactagtcgcaatatgtgtaattaattaatttttaagcttatctttaatacttcatacatatgttcaaatgttcaatgtgacgaggtgaaaaattttaggatgagatttaaacatggcctaaataaagacactcactccgtaaaaaaaataacctaaaaatataacctttctagttaggttgagtaggccacactagctctagtagtgtcccagtggaggagtactgccacagttcttccccttaattgcctaggactggcagagccggggacagcttacgattgaagaaccgggggcgcagtgaaatcgaattgcatttgcatgtgcacttttgtgtgacggtgtagtgtagtactccgtattgattagcagagcagattgggaagttgatgacgctcgaggcgcagatcacggtcgcccgctcacagtaagtactactgctgcttgaattctctgttctctccacagccactggttgagatcgcccgaatcgtaccaaatttggttttagcaagattaaggggatgtttatattgatgtcattttttaccgcatcatttttttaaagttgttaaaaaaatatctacgtttagtttgttgctaaatttggtaaatacataagaaatcccgttaaaattttagcaatattatcaaattatcaaaattttagcattaccaaattttagtaagctttattttggctataatctaaacaagccctaaagaattgaaccggccgtacggcgttgctgccagattattgtgagaagatactcaaattagtggtagtgttgtctgtttgcatagagttttgctacagaatggtggagtattacttactgctggtaatttggacgtatgcctgcatgcccaattaaccccagtgcggcttttgtgtttctggggagctactgtgttgcattcaccaatcagattgaggtgttcatatgtcttgatcacaggaagagcaacttagcaggttccgtgatttctgtcactaaaatagccgagtacgaaattattaaacggaagctaccactaatagcagaagatatactgattgtacgacgaacctgagcaacaatgttgcaacctgttagtatcacataattcaggtaaagataagcataacaggcagccagcccagtcccaagtcccaacacagaaaagcgaaagtgtagctcgctcgctccttctcttctctcggatttaattcggcgacagttgaaatcaaataaagtgagcactgttattctgacttcgaattgaggcaagaatgttcctggcttcctgccttgacaaggaggtgcaaagaaagatgattccacaaccaaactctggtgacctttttttttgtagtaccaactaaatatttggttttcaggccatgccattccacgctccaaaagttcttagctttctctgtctgattttagcccgtcttttaacatcggatcgtttggaaaaaagcacggatcaattgagatgcttttggagaacacatgataaacgatcttatccctggcggccttagtactcgaaccttttttatggtggaaggatcatgttcctgtccctcgctaatggataaacgagtggcttggaagggccaagaacaaatatatatgctgctgcccgtgcaacttgaaacagtcatacttctaggttggtaagcagggcaagatatggatagacacggcataagcataacattaactagtagtagatgaatacgtaacttactatcaaaatctattattattatattattaaaggaatagaaaaaagagcctccacatttgctcttatggtctagaaattcccacattaatcggagaaaaaaaaaacagagttcatatagaaatacaatttagaaatagcttaaattcggaattaaaaaataagtaatattagaagaggatactaaagtccatatagaaatacaatttagaaataacttaaattcagaattaaaaaataaggaatattagaagaggatactagagtccacatagaaatacaattaggaaataactgaaattcggaattaaaaataaggaatattagaagaggagactagagtccatatagaaattctcatattaatcggagaaaaaaaaaagcagagttcatatagaaatacaatttagaaatagcttaaattcggaattaaaaaataagtaatattagaagaggatactagagtccatatagaaatacaatttagaaataacttaaattcagaattaaaaaataaggaatattagaagaggatactagagtccacatagaaatacaattaggaaataactgaaattcggaattaaaaataaggaatattagaagaggagactagagtccatatagaaatacaattaggaaataaaataaattaggaatattagaagaggatactagagtccatatagaaatacaatttagaaatagcttaaattcggaattaaaaaataaggaatattagaagaggatactagagtccacatagaaatacaattaggaaataactgaaattcagaattaaaaataaggaatattagaagaagagactagagtccatatagaaatacaataaggaaataatataaatttggaattaaaaataaggaatattagaagtagagtataaagtccatatagaaattcagaattaaaaaataagaaatattacaagtagagtataaagtccatatatgaatttaaaactaactaaaattcagaataaacataataaaattaaaagtagggtttagagttcgtataaaaatacaatttacaaataactaaaattctaaattaagaaaaacatgggaagaagtgtttaaagtcaatatagtaatacaatttagaagtaactgaaattttaaattttaaatttaaaattaaagaatattgaaagatgagtttaaagtccacatacaaatacaattagaaataataaaaaatcagaattaaaaaaaatattaaaatacaattctagagtccatataggaatatatataatttacaaataacaaaaactggatattaaaaataattaataactaacacttatataaaatacaatatgaatattacacattagtagtttcgtaatttaaaattatattgttattgtaatatattttaataatataatgagaaaacatatatgctattatataagagaaaatataatgatgctagcagcgcaatctgcgcggaccaccgtgctagtttaatttaattatgaagatagtttaacatagactattaaaaagggcgtggctccaggaatgtccgctcattttttacgtcacttaaaagtaaaaaaaaatatcataatatcactatctgatacgttactttacatatgcaaattaaaatttaacttacacaagtaaaaaaaatgataaaattgtaaaaaaataaataaaatagaactcataatttagggttaaatttattatttgttttctaattatataagtcaaacttgaattcgaaattatatggaccccgtcggttggtctagtcttattataagccataacggcttattagcgattaaaaaaatgataagtgagtaaaacttttgtatatatgttcctagtgattgaaaagctaaagtttaaaaaaaactatgttgaaagagaatcaaattcaaaattatgttttaaaattcaaattttggctttggcttataagccatagagcaaacgatgaggctagaatactacttccgtctcaaaatataaacatttttagctatgaatctggataattgtgcgtccagattcatagctaaaaattgttatattctggatggaggtagtaacaatcatataatatgattattgtattattttttaaaaaaaataattgattttgaaattacatgcacaagtggatgctatactaagtttgtcacaattcaccgtactttttatgccacgcttgcgagccacaacttagctagtaaaattaaattgtaccacactttgatgagttgatgacatgtgggacccaaatagatgagaagtaatcttgccacaagtgtggctataaaccaaataataggctaacttggtcaaacttgactaacctaagatgtggtaatctttggtaaactttaggagcaaaccaaacatcttttcactcaaggaacaaaaactcatctccgttcgagatcaagagatcaagtggcacttgattgaggagaagaattccaagaagttgagcagatctgcaagagcggcggcacatgcaagaatgcagaaggccgggtcccctgtggaacacatcaaggctaggcaaggacagacaggcaccggtaaaggtcaaatcgacgcgagcgcgcgttgccgtgcgggctgcgggctacggccggagcccggagcggatggccgtaggtggtgacattggctgtcctgcactcctgctactgctagggtgagggtgggggagcgctctgggaccaaccccgttggttcaaaaaaaatttggtgtgtttagttttttttaaatatatggacatacattcgaagtattaaacgtagactaataacaaaataaattatagatcatacatgtaaactgcaagacaaatttattaagtttaattaatttgtcattagcaaatatttaatgtagcatcacattggttcaaaagattcgtctcgcaatttacatataaattgtgtaattggtttttttccccacatttaatattttattcatgtgttcaactatttgatgtgacgtttttagtcaatttttttttaatttaaacaaggactctatttagattcattttagatagagttatatctttaaaaatatctagctctaaaaataaatttagacaacaaagatacatgtgtgtttagatttattgtagatttaaaattttttggacagtaataatagactagttattttctttttaaacggaaagggtagagttctagtactagtctacgagacgttttggatgcacttcggctccaccgcccaaatccaccccgagatctagcgcgcccttccatccaacgacccgcgccccaaccccagacatgccgatgactcctccgtccagtcctcctcggccatggcctatggattccaacggtcctactcctaccaagctgtggactgtggagtgcagtagatcagctcatcatcaatcatatccatgggccatggccctcgttgattgagcttctttttccttcgccagaaaaggcatgtaaagaaaatgggacgctatcggttagagcaagttcaatagtatagctaaactaatagctcatttatacaatagttacatattacactattaatatctggtctcatctgtcatacacactgtatcttggaattcgtgctacagctagctacaaatctgtagcccgctgcccttctctcttctcatttatcttcttaaaatatatttgcagctggcttatagactgctattgtacctgctcttaaggtcacacgatccatgcacgccatacttatactcccatggtaaacttgcgtatgtactgtgtctgtactgtactgtactagtgtctactagcatacttactattgtagaacggcatgttatgtatactcgtgcttggagcccatccctcgtactccctccgtttccttccgttttgtcggagggtgaactcctcaaacgagggaccgtggagcccctttccggttcggaccggggacacgggtgaaagatcgaggatcaatgaggaaaagagagggggatcgggcccctcaggaggatcgggcccctcaggagtgatggaaaatgcagatggtttagacatattcgggccgtttctgtatgtggttgatcttggtggaaggaatacaagagttttttgtttttttgggattcgtcccccactccactgggcatggatctccttttatatcttaaggggttaccacaaagacccaaaacctagctttaagagtaaggaaaacattctttatagacaattaatgcgtaacttgtcttcggacgtgcagaaccatgcgcgccttaccgcagtatgggcacgtcccaccacaccgaacgacacgggcggacacccgcatcattccttctttgactaacgacgacttcctcccgtccgttcccaccggtcagccatgaccactttgaatggaccggtacgaggggatttggtctggatccaaacttaagacaaaaagcccatcattaatggcaatttagacggagcatggcgcaggccatgctccctgacagcagtaggcgcacgcgcgaggcgctctgcccgcgatcacatcaatcattccgactttgggcgggcgagtagtgcgcctacatgccgcatttaatgcgacctgtcgcgccaactcctctaataaatgcagtgggttggcgttggacacgcccgcccaaaccatgcacgcgtggccgtgcatggagggggtcggggcggcccgacccctttcgtggggtacaaccaacacaccagccccgggtgcaacccttctcaggtcagaaagcgccacgtgggtttgaggcggcctttttcccccgtacgaagtatcccggacccatattatctacacgtttcatattataaattgttttaattttttttctaatcgaactaagtatgatcaagtttatagaaaattttagtaacttctataacaccaaagttttactataactaaaatttaatatatttcgatagtatattttttttaaaaaaatatgttatattttattataaactaggttaaactgaaagaagttctattaagaaaaagttaaagcggtggtagttttgaacaatttggcgtgttcagacccttcattctgtgcatggtcttcgtgttcctaccaaacagcacagcaggtgaaaaaggtcagggaccaacacgacagtgccatagtggaatctttgctgttactctttctttctacagggtcacgtactcacttcagtgttcagtcttcagatgttgtacaagagaagcatttgtttttctcagcaacgttacaaacgctcgggcctcggtattattgtccctcctccgagacggttgctgtattcatacacaccgtgccatttgctgacttgcaaccggagctagagaaatggctttgcttgtgcctacgacgaatgcaaacagttggatcgatcgtttgatcgcgcaggatgagcacgcgcgcgcgagatggatctgcgcatcgtgggatcgatggtgatgagctttggggggtgagggtcttcgtggatgaggtgaacaccttcctccactgtggaccaagcaccggtggtctccctcgctgtactctcgcttgccacggtgaacccctctctccttgtgcttctgatcgcaccgagtgctaggcctcctccgtgctcgctgcctgcaatgggcccgttcctcctcactgtcatgccaccgccgccgctgcgtagaagaggcacgagcagggtacgacttaccgtaccacggttattagccttaccgcgggggtacggtaatataaataccacggtaacctccttaaatttaaataaatttaaaaaataatttgaatttttgataaattttgtacggtttcgtacggtttttcgcggttaccgcgcggtaaccgtgcttaccgccggagcgcaataaccccgcccccgacggtttgggaaaccctgggcacgagaggccgggccagccagtgaaaaaacatgggggagagagagagtagggtagagaaggaagaagagagatggaatttgatgactagcatgccaagggggcctaatggacgatcgatcgccagggcgatcgcccagcgatcggtccaccccccctgcccccgctcccttctcctcttcctcctccccttcttctcttcctattacagtacaccaaattttttttaaaagaataaaaagttagaaaaatttatgtataaaaaatttgaattcaaattcaaatttgaattcaaattcaaatttgaattcaaattcaaatttgaatcgggtaattttaggtgtataaactttagatgtatagaaatactatatatagaaaatatttgaattgttatattctggatggaggtagtaacaatcatataatatgattattgtattattttttaaaaaaaataattgattttgaaattacatgcacaagtggatgctatactaagtttgtcacaattcaccgtactttttatgccacgcttgcgagccacaacttagctagtaaaattaaattgtaccacactttgatgagttgatgacatgtgggacccaaatagatgagaagtaatcttgccacaagtgtggctataaaccaaataataggctaacttggtcaaacttgactaacctaagatgtggtaatctttggtaaactttaggagcaaaccaaacatcttttcactcaaggaacaaaaactcatctccgttcgagatcaagagatcaagtggcacttgattgaggagaagaattccaagaagttgagcagatctgcaagagcggcggcacatgcaagaatgcagaaggccgggtcccctgtggaacacatcaaggctaggcaaggacagacaggcaccggtaaaggtcaaatcgacgcgagcgcgcgttgccgtgcgggctgcgggctacggccggagcccggagcggatggccgtaggtggtgacattggctgtcctgcactcctgctactgctagggtgagggtgggggagcgctctgggaccaaccccgttggttcaaaaaaaatttggtgtgtttagttttttttaaatatatggacatacattcgaagtattaaacgtagactaataacaaaataaattatagatcatacatgtaaactgcaagacaaatttattaagtttaattaatttgtcattagcaaatatttaatgtagcatcacattggttcaaaagattcgtctcgcaatttacatataaattgtgtaattggtttttttccccacatttaatattttattcatgtgttcaactatttgatgtgacgtttttagtcaatttttttttaatttaaacaaggactctatttagattcattttagatagagttatatctttaaaaatatctagctctaaaaataaatttagacaacaaagatacatgtgtgtttagatttattgtagatttaaaattttttggacagtaataatagactagttattttctttttaaacggaaagggtagagttctagtactagtctacgagacgttttggatgcacttcggctccaccgcccaaatccaccccgagatctagcgcgcccttccatccaacgacccgcgccccaaccccagacatgccgatgactcctccgtccagtcctcctcggccatggcctatggattccaacggtcctactcctaccaagctgtggactgtggagtgcagtagatcagctcatcatcaatcatatccatgggccatggccctcgttgattgagcttctttttccttcgccagaaaaggcatgtaaagaaaatgggacgctatcggttagagcaagttcaatagtatagctaaactaatagctcatttatacaatagttacatattacactattaatatctggtctcatctgtcatacacactgtatcttggaattcgtgctacagctagctacaaatctgtagcccgctgcccttctctcttctcatttatcttcttaaaatatatttgcagctggcttatagactgctattgtacctgctcttaaggtcacacgatccatgcacgccatacttatactcccatggtaaacttgcgtatgtactgtgtctgtactgtactgtactagtgtctactagcatacttactattgtagaacggcatgttatgtatactcgtgcttggagcccatccctcgtactccctccgtttccttccgttttgtcggagggtgaactcctcaaacgagggaccgtggagcccctttccggttcggaccggggacacgggtgaaagatcgaggatcaatgaggaaaagagagggggatcgggcccctcaggaggatcgggcccctcaggagtgatggaaaatgcagatggtttagacatattcgggccgtttctgtatgtggttgatcttggtggaaggaatacaagagttttttgtttttttgggattcgtcccccactccactgggcatggatctccttttatatcttaaggggttaccacaaagacccaaaacctagctttaagagtaaggaaaacattctttatagacaattaatgcgtaacttgtcttcggacgtgcagaaccatgcgcgccttaccgcagtatgggcacgtcccaccacaccgaacgacacgggcggacacccgcatcattccttctttgactaacgacgacttcctcccgtccgttcccaccggtcagccatgaccactttgaatggaccggtacgaggggatttggtctggatccaaacttaagacaaaaagcccatcattaatggcaatttagacggagcatggcgcaggccatgctccctgacagcagtaggcgcacgcgcgaggcgctctgcccgcgatcacatcaatcattccgactttgggcgggcgagtagtgcgcctacatgccgcatttaatgcgacctgtcgcgccaactcctctaataaatgcagtgggttggcgttggacacgcccgcccaaaccatgcacgcgtggccgtgcatggagggggtcggggcggcccgacccctttcgtggggtacaaccaacacaccagccccgggtgcaacccttctcaggtcagaaagcgccacgtgggtttgaggcggcctttttcccccgtacgaagtatcccggacccatattatctacacgtttcatattataaattgttttaattttttttctaatcgaactaagtatgatcaagtttatagaaaattttagtaacttctataacaccaaagttttactataactaaaatttaatatatttcgatagtatattttttttaaaaaaatatgttatattttattataaactaggttaaactgaaagaagttctattaagaaaaagttaaagcggtggtagttttgaacaatttggcgtgttcagacccttcattctgtgcatggtcttcgtgttcctaccaaacagcacagcaggtgaaaaaggtcagggaccaacacgacagtgccatagtggaatctttgctgttactctttctttctacagggtcacgtactcacttcagtgttcagtcttcagatgttgtacaagagaagcatttgtttttctcagcaacgttacaaacgctcgggcctcggtattattgtccctcctccgagacggttgctgtattcatacacaccgtgccatttgctgacttgcaaccggagctagagaaatggctttgcttgtgcctacgacgaatgcaaacagttggatcgatcgtttgatcgcgcaggatgagcacgcgcgcgcgagatggatctgcgcatcgtgggatcgatggtgatgagctttggggggtgagggtcttcgtggatgaggtgaacaccttcctccactgtggaccaagcaccggtggtctccctcgctgtactctcgcttgccacggtgaacccctctctccttgtgcttctgatcgcaccgagtgctaggcctcctccgtgctcgctgcctgcaatgggcccgttcctcctcactgtcatgccaccgccgccgctgcgtagaagaggcacgagcagggtacgacttaccgtaccacggttattagccttaccgcgggggtacggtaatataaataccacggtaacctccttaaatttaaataaatttaaaaaataatttgaatttttgataaattttgtacggtttcgtacggtttttcgcggttaccgcgcggtaaccgtgcttaccgccggagcgcaataaccccgcccccgacggtttgggaaaccctgggcacgagaggccgggccagccagtgaaaaaacatgggggagagagagagtagggtagagaaggaagaagagagatggaatttgatgactagcatgccaagggggcctaatggacgatcgatcgccagggcgatcgcccagcgatcggtccaccccccctgcccccgctcccttctcctcttcctcctccccttcttctcttcctattacagtacaccaaattttttttaaaagaataaaaagttagaaaaatttatgtataaaaaatttgaattcaaattcaaatttgaattcaaattcaaatttgaattcaaattcaaatttgaatcgggtaattttaggtgtataaactttagatgtatagaaatactatatatagaaaatatttgaattatttgaattcaaattcaaatttgaatcggatataattcaaattcaaatttgaatcgggtatataaactttaggtctataaactttaggtgtataaactttagatgtatagaaatactatatatgaaaaatatttgaattcaaattcaaatttgaatcggatatttgaattcaaattcaaatttgaatcagatataattcaaatttaaatttgaatcggatatataaactttaggtttataaactttaggtgtataaactttagatgtatagaaatactatatataaaaaatatttgaattcaaattcaaatttgaatcgggtatataaacttttgacttataaacttttggtctctaaactttagatgtgtaaacttgaggtatataaactttaggtgcatgaatttactaaaataggaaagtaatacggtgccaaaaaaggaaaccaggtggagggagggaggggggaatcgatcgctctgggcaacgctcagtagcatttccggatgccacatcagtgaataccactatcaatactgttttaggagttaaattatattggttttaatagttgaggggtcaagatagttggtattgcagtttagcggtatggatcagattggatctatattaagggagtaagagtgcacttatttccttgttatagttgggctggtcttggtcgcggatttatttgggcctagccttttgcccctgtcgagagatgccattgggatcagataggccttcagccgacgctcaatctgtggccatttcagcaacggcgacaaaatcacatcatagaggcagaaacggctttattcagattggagaaaacttgcacatacgataataattttcagaataaactttgttaagcatgagcaagaagcagatactcaactaaaaaaaataacttgacggatgaaaatcagtgaatgtaatttcatttcctttacgctgtccttcagttttacatgattcatttgaagcaggaagctctggaagaagatagatcttggcctatacatggaacatcaatacaaaattgcagtcattacaaactaattttacagcaagataaatagcatgaataattcttgagataggtacacaaagttagacagcatcaaaacttccaaggtggaaacatagaatgatgtgataatctgatttgctgatgaaaacttcacgactgagataaagcgaaaaaattgtagagatacgataacacttagttgtccaaccctgtcactgaggcatgtgaatcacacatcgcaaacacttgttttctagcatcagttcaagtgccttgttgatgtaatcgaatgacaaatcatgtgtaacaaggtcatcgacttggatttcctgagaagaagtaacatgatatcagtcaacattctacccaaacaatatttgatatcagaaaaggtgaaagacctatatattggaaaaacaaacaaggtattttttgtatgtatcacattaactaaatatattgctatgtgatcattgaccaaacatcaaatatgacatcttgtacataaatgctattatgttcgattgtgataaccacttcgcaccacagtaaaggataatccattcacacaattacatatgatgaagttcagcttcttaatttaatatttttaactgaaaatagaattcagttttattaggatgtttgcttctacaacacattgtctccgtaccttgtttgcatacttgtccactaacaaaggtagatcagatttaggtctccatcctccaaacaaagaccccttcaatgttcttccagacagaagtagtgcataatgagcagaaacctctggctttgcttttggcacaccaagagttacagtcagcccccaaccctaagaagaccaaaacatgagaagataatatatctgggcagaataggtggaattgtagtgcaatggaaaggaataaaaattacatcagaacatgattgcagtgcagtcgacactactcctgtatcacccacgcactcaaaagagtaatctgcacctccattggtcagccgcttcaccacctgaaagtatgaaaacaatgtctttatgctgtgtatatcagggatatgatcaagattttagaaactaccaattggacaccagtgcaacaggagctgttgacttattttccctcaaaaattgggtcatgaaacatgtaattataagagcgtactggcaaaagcatgtattcaaaatctgtctgttcaacacagtgccatattctaatcctactatttaaggcctgaacaaatgacttctaaggtcttgatttatttatcacgattccatttctagttcacaatctatgatttagcacaacagtttgtgcaaaaggaataccaacaccaaatatgcagtttagataaaattgtaaactgcgagtgatcagcagttcagttttctcagcaaacatgatgatgtacctgctgaacaggttcattcaattcttctggattaataaaatctgtgacaccaaaagctttccctgtgccatgaacaaaagtaagtatatgggaaaaagtcataattgaagtttagattgaaattgcaagtttgcaaaatacccttttcttgcttttcaggattagtatcaacaccgataattatagaagccccgcgcagcttagcaccttgagcaacctaagtcaggaagatatgagtataaatattacatttcctaatatgctttcattaactaatagcatagcctctgtagaaacttacagaaagccctacagttccaaggccaaatataaccacactcgaccccttcgagatatcagcaaccttccaggctgcaccaagccctagtgaaatacagaaatgaacgaagacatgaatgatcagagacacggttaaaatgcgcagaagtgcagaacaacatagcacacctaattcttagcatcagtaaaccaagtataagctacagaaaggcgtggaagataaagtaaaaacactgatgccatctgagcccttaaaattcacctgcagatacaccacagctcagcaggcatatcctgtccatcggcacggttgggccgaccttcaccgcgcaaccggagtgcacaaccgtgtactcgctgaagcttgacactgcacagtaatggtacacaggtttccccctgagcgagaagcgggtcttctgatcgctgtgcatgacacccctcctctccaggccgagcttctggcacatgttgctcttccctgaaacgcagtgcttgcagctcatgcactctccgatgaagacggtgagcacatggtctcccacttcgaactcggtcacaccttcaccaacactctcaaccacactacacatcagatcgttccaatgtcagtgttccgagcaacttgcgagacatggcggcaacagcaaaagagactgctagatcagtatatatagactatacagacccggatgcttcgtgcccgaaaattctggggaacagatcggtttgagcctgcgtttcggaaacagcagcaaaatcgatgagcgcatcaggagtatcgggctggatggaagcagagctagagaggccggcgtaccgtggattgccactgggtgacgtcactgcggcagatggaggtggagacgaccttgacgcggatctccatggcctccggcggcgccacctccacctcctccatcaccagcgcctgaccgggcgcccacgccaccgccgctgcacgcaacgcaggcatatcccatccaccaaaatcaccaccacaaaaccacgcaacggagcagggagtaactcggccgagggggggctcgtacgtacctcggcaggtgatggccgccgccggagacgacgccgcggccattccggcaggctcgcgcggcgcctcgtaccactgaacaaaggctagagtaggtgcggacggagaagtcaaaccgccggattgctccttgaacccatgatgcgcaccaccaaattagtaggaagacagggaggggtaggtaggaactcccactacctaccacagttgctacccgccagcattgtgaagactcaaaacagcctctgtaacatcattgtgcaatggcttctccagagcacctggagatcacttggaaaccagcaatttagcatccagagtgttcccctatccagatgaaccaaagcagcaccacttttttatcacttaagattggattgtaatatcaatactgaaggacgcatcattaattcatgatcaatacaataagattaacttcattttttttcctttttaaactgattatgtccatgtttatcacccagatttgttcacagaactcaggaacttgcatgcacagcaaaaagttacacaatcaacgaaagaaaatacagcattaatttgttttcgatcatatatttgtacagtgtacactcatagcaatggcactatgcattgaattgattactagtttggctagctttgatcagtaagaatatctctgtaacaatgaggcaagagggtttgagatatgtacaggttagctggtcaggtgaaaaataggaatgggaaacagggaaaattgtgagctctttgcaacagcacggagcacattgtcatctctttttcttgctttcgttgggtttgatcatctgcacaggagcggctggaatgcgggcccaccactctctaatccgccggcggaacttttcagtgttctgtttccttagcggcatctctcttgtgtacacctccaggactgcaatcaggagcagatgtctccaaggtacaaagataagaaatgcagatgcagcaagaaatgccactgcgaccatttcagttgtctgcataaaacaaaaggagattagcagttggtggattaatctcctgtaaaattcaaaactacttcatttacaacgctgtggagtaatccgtaaaaacggttgagaaggtacaaataaatttcaaaggtcagagcttcaggaacaagttcttaaacagttcatgtctgatgaatcaaatgatagttcatcatttgtgtcaaattggacaacaaactataggaagtgcatcttagatgtaaagaaatttttgaaccgaaggaaagcaaatatactaaacaacaaaagagatacctttggaacagctgcaaacaagacagctctgaactttagaagaacaatatttacagactgtagagtttcttccaacttggatatagcatcctgcaaggtcaagatttgctcaacaggatttttacttggaggagttcttacttcaagcactcccaataattgctcccttccattgtacttatgccagagcataacaacagcaaatgccaaaaaaaatgagggcaacatgtaagcaataaatcccctacataacaaaaaggaatatgttaggcaatgagatatttctaagcatactttctaagatccaaaagtcacaaagaaattacctttgaataacatacagggtaaaagctaagaacagaaatgatttcagaggatcttcccacttggtcaatgagtaagtgagtttgactacttgagtgaatgggaaaagtaactcctggaatataagcgcgatccatcagaactcaagtcacaacaaaggtgcatgatattgtagtagacatctgggtgacactaaagttcatgaaattgcaccaaataactagtgaaacgtgctatcttttcttgctgcactctagaaaccattcaatcccaaaccaataagaacaatttaagttgatttatcaccaaagtacctgcatgagggcaagatttgcatccacaccttccacctttacttgatctatagttgcacgtgctgcatctattctctcagagtaacaaattgactcttccaaagcagcctctagagattttgttacaccaaagcaaacagcacaaaagcttatctcactttgagcttcatcttttctcttcagtaatataaatcccattctagagagagcatataatgaaaatggtaatgaatggttctgcagcctattgtcaacgggtgactcagtcaccaaatgactcaacgaagtgtccaacagttgaaagtagttagcatacaaggcttttaagaccatgtctccttttggaagtttttctgctaagctaaaagtgagtgttgtcttaaagtgagaaggagaaatatgaaaagcttctttcacagcagagtatctcaagatgcccaggatagcttttgagagtgcttccgctctctgaacgttttcaagattgaacttcctgatgaatttattcacctgcaatacttcacgagcgattgctaaccaatagtctcttcgtgagggacctcctaattcagggaagtcaaaataaattggctctgttctgcaaataatgtattgttagttctgatggcaacccatagaagtataatcaatacttagcaaaacagaaattggtcctattggagaatcattcccctttcaatacttacaaagtgcttgatttgtacatcacagccttatcaaacaggcgaacacccaatggcccagtaaaatcacgcttgataacctgatcagaatctgttgctaaatcatatttaacaatcttgtcaccataacccactttgatactctgaaagtaaagagcatgagttgtaagaatcaatcttcctgcgaaaaagaatgaaaacatcagtaacttgccaaaatgaagcacggttgcaaattgagaaatcaaatgcaaatttaactaattcacctggccatgctgatattccaatgtgttgaaaaacaggatgaataggcctgtctccatccatagctaagatacattccccagcatcaagatgaaaacttgaagcaagcggtgactgcaatatacctttgacagatctgaataccctgtacgtaagaatagcaataatactcctctcagtgtctttattgactcaatcacaacgatagatttgaagcagaaagaactaccaaaaatctagaaccccctccccacgtattttgtcactaatatccaagatacatgtgaaacattcaccagttttgcccaaccagcaattcaattatctataataaatgaccagttatgttccggaaagaagatccattttacaacagaagacctactgctgtgaaactccatatgcagagttagaacacggatagttcaactcaacacaatcactctttcaagttttcaacggtcattacaagataactatgcacagattcagaagacattgacaaacagaagtgaaaatgaattttgagagcgcaataatctaataagttgtattccttacttgtctaaacttttgatatacttgtcaaacacgaaaaagtgcaagcggccaccagatgaacatgtgagtgcatcgaacagattgtggacagtaaccaagtcagctattatagggcatgaaggtgctattcgtgcaaaagcacctaagccaactgtcttcttgtcattgacctgaaaatggaccgcaattgatcatgtgtgtgcacagtgaagaattatttccaggttagaaaaagcaatgtagtttgtaaacagaactaacttgaaccgccaatcttgtggaatttgcataaaaaattgatccctcgtcatcatcttcaatatccacagttgtacgcaaagcagaatgctgaccatcatagcacaattagaatgactgctgaacatcgtagagtaaactcatacattgtgaaagttttacacaaaaaatgcagatttggcaatatttttcccttttgctgaaatataaacattttgataaaacgaagaagtaagaatattacaaacaaactacagaaagaaatgtttctcacattttctgataattcatcctcaacaacagcacctgggtgttcccacgcaagcatcatatcaaacattaaacggcgaagattcttatcagccaaatgatctggacgtgtagttacttcatggagagctttgtggcagcagtactctaaaaattcctttgcatatgtattagactccttacaactatcgggatagtcaacttcaaagttttgctgcaaggtttcggttgcaagagcaagaaccctgaaaatgttaatttgagaagaaacttgttagaagtttgtcaggcataacaagaaattacaacttaaatcatataagagtggtcaaacaaagcagaaacatgatcatgtcagtgtatttaaaaattaaagataactacaatagacaatagtaagctatggaagttgatccaattgtggctagcatatgattctcagtactccccttaacaagttagcatgagtgcttgatcagtgattattgcattaattaaccatcctgcaacgctacaggttgttgcctttatttgtttgtgttctgttgacctccttcagacctgtttgctttagataagtagagtgttggctgaacaagattaattcagagtttaatagtaaataatctatggttgattcaaagttgaagaataaataatccatggttaatttagtgtttaagaataaataatgtagataatcatagtttctagatctcttaggcacgggtcagcaatcaaataagtttctgtcaggcataatcatcaaaactcatgtgaaactcaggcatgcaattttctcaggcacaatactcaggtcaccaaccaaacaggccctatatatatatagggatcacatgctcacaatggccaagtgtccagaaataaagagtaaatttcacaaaactacacgttttgtagtccaagttgcataaaaccacacacactttgatacttagcacttaagtacatatattttggtagtgtagtttcacaaaaccacactatcgatgaatggattcacccgcgagatgacgtgactgtttcacctaggatgaggacatggcatcctattaccagccatcgcacgaaattaataggatgccacgtcctcatccttgatggaacaaccacgttatctcatgggtgaatccattcatcgatagtgtggttttatgaaactaaactaccaaaatatatgtacttaagtgccaagtgtcaaaatgtatgtagttttctgcaacttgaaccataaaatatgtagttttgtgaaatttactcagaaataaaaaaagctaatattaccctcaccatttccaggagtgacaatattgatcctatggagagtatgccagtacattgaaatcaagtctatcggccttgagaatataactatagaagcacgctactcttctattggtaaaccaaatcaatttacctaataagcaatgatggattagcatacactgattttagcatccgctgagcaaaccagcaaatatacgagttaagtttgggtcctatgcaatctctggcagttcagtactatttcagcgtgatcatgcggggtagagtaatgcaacccacaccgatcgagagcacccagatcggccgagctaagcgctgccgtcgttgcggatgagcaaaagcaaaacagtcactaaatggattggatcaacctccatcccccaaccccaaaccccgagtggagtagagaacaacagattcgtcgccccggaaccggataacggcgtacctggagcagcgggagacgacggagttggcgatggaggagagctgcgggatgctccggtcgccgggctcgccgtcggcggacgccgcggcggcggaggaggaagcgagcagggccgcggcccccgccgccgcccggcgggtggagagctgggcgaggaaggtgcggatgggcttctcccgcatccacgtctccacgatccccatgcccgacggcgccctcgcgctcttgctttgcttcaaccggaagcctctgcttcgggggctttttcagccgggcagcggcaaggaagccagccagcctccagcctcgagttgttttatttccgccgcctcgttcagtccgtgcggtttctctgttgcctctcagcggtttcgagtcagttctccgtgaggagaggagacggccattggctaaaaccaccaatccccaataataagatgggcagtcaccggttgactctggtatttctgggatttacaattttttttaaagacggctgttataaaatgggatcccgttacaacagacatattaactattctcttgcacaaatattacaggtatcagatcctagatatcacaggtaccgggtaacatgtatcacagatatcgggtaccatgcagctggtaccacaacaggtatcatgtatcaggtacggtctcatagaagggtatcttgttccaacaggaaactgtctaggttttctgtttttaaaaaccttttcaatttttatttttaaaagtaaaacatcctaaaacttattttcaaacctaaagcatttttcaagctaagataacactgacaatgtttatttttggcgcacctaaaaggtttagattttaaaataagttctaatattatttatttttaattaaaaataaagaaaagttttacaaaataaaaaaataaacatgcacggtgagactacacaagatattaagatattagtagatatgagttaacaggtcagattctcgtgcctcattcccacctgtacaaactaaatctttccactctaaatcttggatgcaaaatttttccctaacctgtacccacggtcgaatgagatagggataggacgagaggcaacgatacaacggagagtagaggtttgtcgtgagcgtgactcgttgaaccctccttgttgtctccctagatacaagtgcggtatgtgtggcagtagaaaatacatctagggttgagcatgtccgagtaggatggttctatactaggttttggatttttagtgctagactgctagttgcttagaccacttgaactttttggggctagggttaaggatgtttttacccatgagttaacaggtggtgacaaacccaaaacaaatattacgtgtggttctattacatgctaatgattcaattactgagtaacataggcataaatcagttcgagaaggacaatctatttagaatcatgtgcactcaagaagatatacattggtacacccctatatgatgagtatgggtggccaaagaacagacacagacccaatcaccctacgggttagggttggcctatttcttatataacgtataatagagtaaaaatgcatcgggatccaattccataagtagataagggtttgttttgctaacccaaatcttcctcttgaaggccacgaagacacgtaaaatcctctgaaacacataatttcataagactttcagagttcatctcccatgaattcgttttgaagatcctccatgttaggaaacgataggcaaacaaacgataaagaacaatagatcaatcatagatgacacgatatttaacgtggaaaaccctcctaaagaaggagagaaaaaaccatgggtaccagccagcaaaatatcttcactatatcagggtaaggttacaacgccgcacgacgatttacaagaggtatatatatgaggtgggaccttaaaagggattacgatacgatccggcagggcctccacttcgctctagcagaagctggtttttattaagtgcaaatgaatttggatcacaactcaacactcccttccaaagaaaaacctaaagtttatctctagaaaatgcgttataattagattttctgccaaatatgctgagatgggtggcttcaagctgggccatggcccatgtggccttccataaacaggcccagcctgaggctctagcggatgattccggcctgcctaacatcatacccccttcgtctcgagcctgcgtggatcgcctcttctctttattccatcgtcacttcggacaagcgaaacgggaagcccagaggcatcagccaagccacacgtctcgaagcttcttgtaacaggagctagggttaggtctccgagcctccgaccttccgattcctctccgccggcagccatgtcaggtcgcgaggtccgcgagtacacgaatctcagcgaccccaaaggtttgcgattccggcgcatccttccttcttcccggtttattattctcccccattgatgttctgtgcgctttcggttgttcaatattgattttgggttctgcagataggaagtgggggaaggggaaggacaagattgatgatgaggacatcaccttccagcgcatggtcgcaaaggttagaccggatcgtatcgctaatttctggcgttatttagataggcttgtgttctagcgttttctcgtttaatataactgcaaacgtgttggagattatggtattgtatatcggtgaaataggctgctgcatttgtattttgtaggtaccttattatatttagggggaattttttttagtatttccgagctaattaggtgatattagctggcgcttttttagttgaatgcttaaacctcatgatttggattttgaatacgatggccttgcttggcttggtgcatatggcgtcaatctggctttacatatgttttgtgcatttctgctctggtggactattgcttagtttacacatattttttgtggaacagtaatctccagccttttcttttgtgctcagttccttcagcttgattcagttttcgctatacccaaccctgaataagctaggtggattgtataaaagtaactttcaagatcgaaaaatagttgtggtggaaacctagtgcataaacaccataaccagttggaaataaatggaatcagttgtttttgaacttacaaattgtattcgtattatgttaatttttctcctgaatttgagttgctcatgacccacctccattaggtactttgcttgcgtttaatctgaattcaagggatacttggctgattcctatgtgttgaattaataggacaaaaaattgcctttgcttgaagtatctatgaagatgaatatatatatttaactgttgaagcaatagcgcttaaattggttaatggttatgggcaattgtaatgatttaccttttcttttttcctttcgaaagcttgctttcttatcgggtgcttcccacgggcatctatgtgcaatgttctgataacatgccctgacagggattttggctctctacttggcggttgatgacgacagatgcaggaggttgctggtgaacggggaggttaccttcatgggcgaggaggtatttcatgctctctgtttttttgtatgaatctgtgtaggttcctcattaactttgttttatgtgtcgatgttttttcagcattggacagtgatgatttactgtacctaaaagaacaaatggaagctgaggaagacgcagagcgtcttcttcgccgtactgagaagcgtgcatttgctgcttttaagatatcctcttcttttagtcatagcttatgttttgcatagtacagtttcatgaaaaaaaaaaagggactattagctcaatatagctcaaaccagtcttatgtcaaattgcttttttttttccttttacataattacctaatttccattcacaggtcaaaatagcagtatagcatgataggaatagccaccaacctgtgttttctatgttagtttctatcaatctctttgagtttctttaactctgacatcacaaagcagcaattttagctgattctacacctgctgttcctgcggctcttcgagtcgagcctaaacctaaaagcgatatcaggtaagctgtgtgtaacaaaggttttacttccatctacagtccgtttgcttattatgggcacatgttgtctggacaggcaacaagatctcttgaagaatattgtcgggatcaaaccgaaacggacaaaagttagcagcccttcacaaccagcagagaacgataaacctaagcagagcccagaagattctgtcaacaaagtgtcctccccgcagagccaatcaggatccaggaaggaatcatctcagcgggacggggcagtcagttttgagaagcctttgttgaaaccagttgaaccgagagagtccaagccacagaatgcaactggaagcttgctcggtttagcttacgagagttcagatgaagaatgatcattggtttagatggaaagcagaactagtgtgtagattgtatattaggcattttgtactgcttgctagagcatgttttgtacctggatttgttaaaagctgcttaaagctgtttttttttcttttttacaatttttcctatgtaaacaaacggttgaaattggacggaactcatggtttaaagtttacatgcgtacttaactcctcccttcccacccttcggaatattgttaatcattgtggaaactcgaacatgattgccgtatgtaattgcatgggatggaaacagaactactggccctgtcaacaaaaactaaaatgatcgaccaatggatactggatacacaatgctcatactcctacctagcttaactcctcccgtcccaccccctcagaatattgttaatcattgtggaaactcgaacatgattgccgtatgtaattgcatgggatggaaacagaactattggccctgtcaccaaaaactaaaatgatcgcccaatggatacacaatgctcatacctagcttgtcagtaacgtgacagcatgaatttgaccattacttcggtagcttaaaggcgactttacaatttgcttcaggctcacaaatttcaaaggctgataaccaattctacagctttcagaaaacgtcataatttgctccagcctcgcaaagtcgtagcagcaagaggaatgtgtcatcttccagacataacaagaaattcacagttttctccaaaaatttctgatcccagaagcaaaagatttcaggctcccaaaaagacctgtcttcggctcaacctccgggttctcttctctgtatgaaaacaaataaaaaggggacacgttattaacaagacatccagcatgaaaaaatgacaaaagagcaactgaaatacttaacaatcagcatgttgtattaaacaaattgacccaagagtgaaactcagaaaagtgttctaacacataatgattttctatgattgttatcaaactagtggaaacaggcggtacactaagtcagaaagtcccatttgagcaatggaatcaaaagacaaaatgcatgactataataaagtagtcatgcttagaacatccaccaatggaactagaatgtgttaacttgtgtagtggccagagctgaacataagattattaaagtagtattcatttgatatcattaattgatgcaagcaataatactccatagtttaagtagttgatcatacaaaaacactgaataatgcaaacataaccagttattaaattaaatactataataatgaaacaaatcacttgataatacatcggctttaacatgaaaataaggatatagcacgtaataagcaatacctgtccagtacatttgccttgaccgtcttatcaccttcaattggatctgatacaggtggttcactgacattcttaaaccttgctgtactattcagctctatcttgtcagatttgctttcccctagttctaggtcagttggatctgatttagtatctagtcccagagatatggaatcttcattctgcatacacaattctgtgtattagaatttttgagaaaaatggctacacaattttgtatcagcacaaaataatgaactcatggaaatgttcagctcatagcattagaacctttatgctgtcactttctgtttgacatgacttgattgattcatttgcaccctgtaaactatctgcagtgtgaaggtcttgcttgacagcttctgtttctccagtgtaatgagaagtgcctgatgtcatctgtgattcttccaatctccatgtttcagtctgaaaaaaacacgtataaggcatatgaaatttatggccgcggtggcttgtaagattggaatcaggttttagattgcacgcttgaagcgcataaagaacacaaaagtttgtcaaaatgggtgaactttagacattttaacgtactgtttggcaataaaggcaaaacagggagaaacacaccttatctatgatttcagtgctggtagcagcaactttctgggagaggtgaaggtcatctgtattttggtttccactgaagctttcagaattaaattgagcatttccatggacatccttgggctttaaatgctcagaatgttcagctgtttcgggcagctcagctgccttagactggtccagttgtaacattctctggttgtactcaagttcctgaactatctccctcaccgtgtagtgaccccctccaacatgttgacgaacagtcgtcatcgtggggaatttaccatcattcgatgccttatacctgcactaagcaaaaccacgaagaagcatgaactattagtcatgttgtcgctgcatttgagccacctattccgtatcagttatgtgcaatcacaacacataatagataaagtcgcgctacatttcacaacatcggtttctaggtttgaagttcaagtagtgagatggtctaaacagcacactacttgcgccgtgtttagttccaaaatatttcttcaaacttccaacttttccatcacatcaaaacttccctacacacataaacttctaacttttccgtcacatcgttccaatttcaaccaaacttccaattttggcgtgaactaaacacagccttaaatgcaaaaccaataaaccatccataaatctcctaactcaaatcaacgcaagattcacaaatgccaacaggacaaagccacctactcctcaacaaatttctctattttaaccctcctctcctgcttggtcatcctctttggccctttgggcgcctcctgagcggacagcggcgcggcatgtgacttccatcggcaagtccggtggcacgagcgcgagatcgtgctagagacgcccgcaatcactgggaaacagaacaaacaaagatgaacaacgaatcagcaccgcagccaccccccctaaaaaaaactcaagcaaaattacccatgtggagggctccgattactcaccccgcttggatgcggcggcggtgtagaggcgcgcggacgcttgcatcggggaggcaatggcggattgggctggggggattggggttttagggtttcatgggttgttttgactcgatgaggacgaggttttgtcgtggtggggaagccgaagggagaggagggtaggggcggcggctggtttgatgtcttctcgccggcttttcggccgactagttgggccgatctcggcccatgtaaatccagcaaaatgcctgttcttaaagctgggcccatcttgccacaggggttcgtctccgcgaaggcggaaacaacttccgagaatcctaaccagcgatgaatcgctccgggcgatcaatccccccccccccccctccctccactttcttttttttacaccatattacttttctattttaaaaaatttatgcacttaaagtttacacacctaaaatttacacatctaaagtttatacacttaaatattacagacccaaagtttataagtcaaaagtttatatatccgattcaaatttaaatttgaattcaaatattttttatatatattatttctatacatctaaagtttatacacctaaagtttatagacccaaagtttataagtcaaaagtttatatacccgattcaagtttgaatttgaatttgaattcaatttttttatatatagtatttctatacacctaaagtttatacacataaagtttatagacccaaagttcataagtaaaaagtttatatatccgattcaaatttaaatttgaatttgaatattttttatacatagtatttttatacataaaattttctaactttgtttttttattattttaaaatttatggtgtattaggaagagaagaaggggagaggacgtatagtgggatgggggggtaatcgctggcagcgatcacccgcccattagcgtcgccccaacacaacaaaagtgtctcccaaatgaagagaaaaggttgaattagaacatttgaaacatgaaggtgaaacttgaatctgaacagtatatatgaacaaaaacccttgaattagaacatttggaagatgaagagaaaaaaatgaattcaaacaatactactaaaacaaaatgctttcgttgagagtcgaactcaggacctcccgcttactaaacgggtgctctaaccaactgagctacgaaagctctagttgtgttattttcagtgtttcgtcaattttatgttgttttccctgccaaaagaaattcatgaacactgaataaccatgatatgttcagtgacttgtactaagtttccatgttcatttcattgagaaaattactccgatcctaagaattgcagttttgataggagaaacttgagagagtaatctggaattgtggtactgaacccggactacaatgatcaatctggaattgggtttttgaaatgatagtatatagagattataaaccaacgtgctttgtaacaaaaataaaatcttgcataaatggaaaatgaatccattatatgctgagctagaacagaagaacctgccgataaactggaaatgaatatgaaatcaatacaccagaagattcaagtgtgcagcctaaacactgacgacaagagtatacattgccaatgtcacacaatgacctacatctgaacaatgtatcactaaaccaaaacagtggaccacaatccacaaacacatctgtgactgaagcagcaatccatcttgccactagaaacccaatctactacgaatgacactgagcagtgatcacaaattctacaacctaacagcagcatacatgagtaacatggataattttttccttctatgacatggccgagacggcccgaacacccgaccggccgctggccacgctgccgccgccgccgccgccgctgcgatgagcaccgcgtccacgatgaacgacgttgttgctgttaccaccagagctgccggcgcgcgaccggacgctgtgctccggctgcgccgccctctgcttgctgctctgccgggagcggttcagcgggctgcgcgcgccggcgtggctgctgctgccctgctcgaccacctcgtcgccgttgttcgtcgagcgcgacgcgctccacgtccggtccgtggactccaccgagttgggctcccacgacggcgtccacgggttgccggagacgctgttgctcccggcggactcctgcggctcggtctcgccgccgccgccgcggatgtccccccgtggggcggtggcgtgcctcttgtgcacgcccggctccgcgaggtcgtccatgccgccgccgagcggcgcgttgaccgatcccctgtcgttggcggagcggtcgggctcgcaggagtggctgtccgacgacgaggagttgaggtcggccacggcgtcgaggatggagcacgccttggagacgcacgccgggagcgagaagctgggcagcgtcgcggcggtggcggccacggaggtggtgttctgctgctggtggtagctctggatgtcctcgaggagctgggtggcgtacgagttggtgttctggtcgaagtcccgcgacgcccggcgagaccgggccttcgtgttgaggctctcggccgtggcactggccgtgcgcgtcgccgtcgtcttagacgcgggcggcgccgccgcaacgaggaccgtctcctccacgaccttcggcttctcctttgaacgctccgtggccttctggggagcggcggcgatggcgagcgcgttttccgaaattttctggattcacgcgagggatttgagataagaggagggaattgcggcaatagctggcataaaaaaaactcgaaatttgtataggttgtttaccttgtggtgattggcaccattgttgttgcggagggagttctcgtcgatctccgccatggggctgcgcctgtacggcgacgagctccggctcagcgaaggcgtctgcgccgccgtcatctgcccgcctccagcattctcattccctgcagccaccatcctcgcaggcgagcttgatctcggagacgcgcacctcttgccggacgcggccgcgggcgacggcgcgcgcgccttctccctcgccgggacggacaccatcttccccggctgctgtctcaccacccgctctccgccgccgccgcctccgccggaacctgccggagccggtgcaggggacacaccttcggcacgccgcccaggcgatcggctcgctctacggctgccgccgccgctgctcctctcccgactaccagagcgcttccgctgcggcgagccccggtgaggcgacggcctggacaccgcgccgccatgcctctcccaatcgcgctcctcatccccaccaccaccacacccgggtctcctctcctgatcaaagtcgtagctcctcttcgacctccggtgaccggcccccgtctcgctcgacgccgccctcccggacgagctccggctgaggcggccgcactggatgaggatcgcgtccacctcctccttggtgcagctcgacgtccgcaccggcatggtgggcaccaccaccaccggcctcctctcctccacattcacggccccggacttcgtcttcacgacgaacaccgccttcttgtctcccgccgcctccaccgccctgcccgccctcgtcttcttgcccttgtcgtccgcggcgatcttgccggacttcctcttcacctgcggggaggtggtggcctctgcaccaccgtgcggtggcgtcgtctccttctgcgtcttgctgcagcagagacccatggtagaggaaaccggaagaagatgatgaagaagaagaagaggaaggttgagttggagtgcgaggaggtggtatttatgcagtgcttggggggaagcggattagggggaattaattatgtgttggaatgcgttgtgttttgtgttagcggctgcgagctgcgtgcatgggcgtggctgatggctgctgatgtatgagatgatgagagggggggatttcaaatcttctctcgctgattgcattcgggcgcacgggtggggcgaacgttgaggagaccgtagacctggcgtttgaggactgatctgctgtgtttagaccgtggcagtgatggtccacgagtaacggctccacggctcacggagaggaagctgaggctggggccctgattatccatctcaattcatcaaaacggacagtgatttaactggcatagggcatagtggtactaatgtaggagtatctggctttgattatcgtttaccagtactgcctggctgccagcacagcagatcagcgcagtatttgcttactaccagtaagggcattcccaacccaagacactagacatagacatagtttccataaactccacatcatcaagaaactagtactagacattactcttccaatacaaacactactattccatatttaaatttaatgctacttatctcactactattccactactattcttctctttcctcatttatttacttgacacatcattttttattatatgtggcagcttatttaatgctatggacaccatcctaattattgggttgggaatgccctaatgcattgcacgcataaatcaataactgcacccggtacatcagctgcggacgggtttttttttaaggaaaagaaaagaaacgaagtactagtagtaattctttgtgggcaaaatgctgctgagctgtgagattcagttctcaccctttcttgcagcctcgaagcgtcacggtggtaaaagttgttcatttttgctcggcttcaagccttcaaccatgcggggccccgttgtcacttgtcacaaacaggcttactgtatctgcacggcgattcaaatgggcgttgggcatccgacgcgagcgagcccgatccagattcacccaacggcttcctgcctacgacacgcagacgcacaagatttgcacgctcgcgggcgattccctttgccctcctgtcgcaccagaattcgaccgttgcgttaaaatacctcttcttttgaacgcccggagagaagccgaccgttgcgccacgccagaaagcccaaaaaacgccaccgcggcatccgtggcaaaaacccctcctttttgatcggatcggcacttcggcagcgccgccagattcgcgcggccgagagagggaagtgaaccaaaccacaaggttccagattggtttttttctttttttttcacgtggacggcgtgagaggaaaatggaggagcagtgggcagcaaagcggatcaggcgcagccattgattggtaaattgattggctgatggatttcatcagctgttgcagtttagccattcaattactggggcctgatgaccccaggtggcatcaatggttcacgatttcacgtatgcgtacgacttgaatcgctgccggcgcatacgaaaggataggttttttatgtacgctcggaccacgctcacatggactgaaacacatggattgaccaatggtgcctttgggggattcaaatggagtaagagaatccaaagctagctcaggcatcagggagcttccaagttgaccgttctgatccgggctacggagtactatgcaaaatcgaaggacgcatttaaatggcaggtagaatgtcagcgaacagacgtatagctccacaaaggctgaacatgtaaagaggagtaaaagggggaagacgtaaaagaatgcgaaaaagaaaaatggatgcgtgcttttctcatcagacaaaccaaagaaagcagaatcatggctcactggagtcactgtccatagctttgagtggtttcatcgaaattcatgccaaatttacatcaggcataccacttgcattatgggagcaaacctcatgaaaggcacaagaacgatagtggagtacggtaaaacagagactttgatttatagctgaaggaaacctgaaatggataccagaaatgtagaatacagaaaatgcatcactcacagcacaaatcaatagcgaataccaattgattttatttcggtgcattcggtaatagcagtgctaaacatctaaagtacgtcaacaaacacaagtcctcagagttcaccagacaataacacctcaggatcactactactataaacaatgtttgcggatgtaaattcacaattgagactgtgacacctcagggctctaaaagagaaaagtgaagtacaatgttttcagatgttaaacacataactgagacagtgtggcacctcagggttctaaaaaggaagtgtagtataatgcttgcagatgttaaacttacaagtcacaacttgctgattctgtctaatttgagctttaaccgaacagagcattagtcatcatgcataaacagaagaaattttacaacaaaatgctgcagagagtaaaaggaaatgccgtccacattgaatccttgaaccctttctatagtctatctagccatagggcagaagcatcactttaagttgtcaactcgacattgtgccatgcaaagatgcactttcatgaagccatttccacttttgcagaagattgagcaaaaaattgaaattaactgcagtaaacaaatttactggagaaactcgcacacacaatcaaattgcaatatgatccttacaacatcgttctttaaagccttaatgtaagtcttatttgatgtttagttgctacttggtgcagtctgcattatgccttcaaacataatcgcataagaaacagaattatatattcataaaaagaataagatttttctgattaattccttatttattaggctaccttgtatccaatgcatcaacttcattttgcattcattttctccttgttgattcagtccaaataaattcaatcttttgaacacattggtgatttcctagaaatcgatgaaaatcccatgagcaagtttcaaacatggcgtcatgaaattttcataagtagtgttctcttctaattcaaagatcacattttgggtagttcccaaaaggttaagcaaataaaagaatttttgttttagataagctgacatcttcccaaaaccttcaattaacataagtatgcatagcattgaatttatggttatgactaaatttggtcagaatatgtctcttttacggttatgaattgacccagttggctgtttgatggcttataatttgtgggtaggtgatagatggttccaaatggttggattaaaattctccggaaacaatatgcaaaggcttggaccaaagtggaagtttctactttcataatacaatgcattagagtctaacgggcaggttgttctgagacatctgtatgcaactaacggccccaagaagtcccagatatatcgcattctggatcagaaaaacaactacataaaacaaaatagtacatcttgcacactatatactgaagagtactcggactagtttacatgtagctgcatgttatgccactttgtgctatctgataccatgtcgtactacccaactgaggacatagagaatgtcacaaactaaaacatttaatgcaatctctagttctgttcatatgtttaggttatctttcaaatcttgtaaaattaacaaattttcttcaggataacctggagaatgattctttttagaataaaggtccccggacccagcttttcattgaaagcaaaagatagatagtgaattctcagtcttaatgccactttggataggaggaatttggattgaaatccttgtccacatcatccaaacaccttcttcatagtttgttcttctgtaagcctataaggagtgttttaagagaacttacttcgttaggatgtatgctccgtgatcagataatttgacggtttcatggattgggcatgatgattcaaatgttgctagtaatgtatagctctacttgcctagctgattcccacacaacaaacatcagtcttgcactcttgcttgcattcaatagcacaatagtgcattttcctagttgccgcactagaactataatgataagagaatcagcaaaagaaaaaaaaacatagccagcaagacaacagaatgatcactatttatagctatcgatcatcatcatcatccaaacatttcccacatctgaaaaattagatgtcgaactggaggaggaagagcatgacagtaagcaaacaacttccttgccatgttccctactctcttcagtctctctcatctctctcaccacacaaccgaaacaatatacacatgccacagctgcggtcattattgtataacaaaaggcgctaggcttacttggtcacggttactgatcgatctcattcgtcgatgaactcgaactcgtcctcgcggaggtggacgaagaacctgaccggcttgtcctggccctccacgctgagatggaactccaccttgaaggggaaattggccgtgatgcgcttccccttccagacggccacgtactgcttgacgacgccctccattcccttgatgtccaggtcgggcgccttcatgacgtggtacacgcgcacgggcgccgtgactcgcacgcgcttcccgatcttgggcgcgacggcggcctcctccgcggccacgtcctccgcggacaagtcgcggggggtgagggcgacgtggcgcgcggtccggaggcgcgcgcggcggggcagcggcccgaggcatcgggcggcggcggcggcggcggctgaggggaggaggacggaggacgtcgaggtggacggcggcgccaaggctgcggtggtcgtcgccattgcgagaggctaagctgcggcgcgcgcgcggtgtggagagacggttgagttcggtgtcgaacaggtggtgggcgcgggagaaccgagtaaagaggataggcgtggggaacgaaaggtggaggtgcggggggacaggagaggtgtgcgattctccgagttgcgtaaaaaattctccgatgccttggatttgctggttttgggccctggaaatgtcgagaatttcaaggattttcagggataaaatccaagaggaccaagaaccctgtctctctcaccttgtctccagaaatcttcctgcaactctggtttcctcgttttatcactaaggccatgttttgttcccatgaaaaacttttcattatgtcacatcgaatatttgaatacatgcatggagtattaaatataaaaaaactaattacacagattacgtgtaaaattacgagacgaatcttttaagactaattgctccatgatctgataatgtggtgctacactaaacatttgataataacggattaattatgcttgataaattcgtattgcagtttataggcggaatctgtaatttgttttgttattagtgtatgcttaatactttaaatgtatatccgtatatccgatgtgacacgttaaaactttttaccttaaaactaaacatggcccaaattcttgtgatttttttaagaatgcgagtcttataggaccaagtcatgtcatatacgccaaggtgcactttgaagatgcttcggctgtgtttagatccaaagtttagatccaaccttcagttatttttcatcacattaacctgtcatacacacataacttttcagtcacatcatctctaatttcaatcaaaatttaaactttgtgctgaaaagacagattccattgccacgacaggaggtgagatggaacgaacgtagcagaatttggcaataataatgcaaatgctcacctgagttaatggataaggccgggagcacacacttggctgtggttggccgtgcgcccgtgccaaaccaaaaggagcacctagcgagtagtagcgactagcgagcacgagagggaccggacagctcggcttctcgttggtttcctcggttcgagtcgccgcgcttgcgactgtcgctggagacgacgcttgcttgcgttgcgttcccccgccgtggaggagccgccaagccggtacgttctgtggataaagaacgttctgaaagccttctgttcccggccgatatgcccgagtattagcacagatcccagttgacagttgtagagatggcgtcggtgcattcaccagcacgatcgttcagtacattgccttcttcagacaaacacttgaagagggagacccatagttgccaaaatggctaacaaaataaggcactacctcataatattcttgcaaaatgttaagtggcatgtagatgaaccatccatgttgtctacaataacgagcccacaaagatggtatggtaaatcatagtaacaacccatgtaatcgccagtgcaggttcctgtggctatttacacccccagcaagtaaacaaacaaatcgtaatcgaccctgcaattcactgcagcagacgatctttaacatgcaaatgcagtggcactgacacatgtgattccttccttttgcaacgtgaagggtttccttacgatgattgattaccggtttctgtcttcacatctaagatctcactcagggaagcagaccggacaagtgaagctgctggcagaggagctagtagtttggctgctgggactcgcagaagatagatgcggttgttctcattcagtgctctctccaagttctggttcatatcttgttcgagtctggaggcagcatcataaagggatcctggggctccacggacagctttctttgcatcgacaattgcattaattccaaactgtaatcgagctatctcttcaccgatttctgttttctcatgcagttcaatagcatagtgatagctagcttctgcattgaatagagcagcctttaacaggatgtgtgctacccaagatctctcaaagtggttttgtagtggagggataaccagtgaagcataagcttcttcataatacaaggcagcctgcttagagaaaaacgcacaacgttaggtattttctgatgtagatgcttttggacatgaaacatacaaaaaatgaatactgtgcagtctatagataacgcaagttagggtgctaacttcgctgctccaataacctgatggaaacagtaaatagcacatctgtaaactttggctttcctaaggctgtgtttgagggagaggggattgagaagattaggaagatacgtaaaacgaggtgagccattagcgcatgattaattgagtattaactattttaaacttcaaaaatgtattaatatgattttttaaagcaactttcatatagaaattttttgcaaaaaacgcaccgtttagtagtttgggaagcgtgcgcgtggaaaacgaaacaaccaatctccccatgttctccaaacaaatgcagcctaagtcctgtatttctttttgaaatgattggtcaaacttttaaagcagttggaacgagttcaaaattcattattttcttagtgtaagaattatgccacagtaattttttggtcacaaaatgctggtgtgatatcagtttaggcataatatacaacaaaacatccaccttgcaacaagtgttcactggttctggaagtaaatctgtattttaacaatcaggatttgagcatcataggttatctacgccaaccgggaagcacagacagaatgatgtttgaggcttaagtctaacatgatcttcattctcattcagaaactacttcatggtccatagaaggaaatgaatacatccaccaatctgcagctagtattagatcttctgattcaattagttcttttgacccagttaaaaagttaatttattagatttcatatgtatgatggaggatggtaagacaaatgatggaccgagacatgcaaggtgatgacatgttactaacagttgtcctgatgctagtgcctgtgggaagctgctcgtgaacttacttcagatatttcctcctgttgtctattcattaactgatctgttcttcaaacttaactcatagttcacataatgatctaaagctagaattgtactgtatcagtattcagtaaggtagattacaaagaatgctcagccagctcagtttactgaattcctagcacaaaacagaattcttggaatggatgtgatagtaaaaaatgaacattgtgcaagttaggggtgctacatagtgcatagtttactgcaagtttctgtcactgtaattcagcacaaacagtattacaataagctaatatagcgccaacccagcctcccacaaaggaggctttataaacttatagctaaagctaatatttcacgaactaactgcaaatcatgccatagttctaaggggaatgcaaagggggctattttcgatactgcaattggcagttggcacaaatttataggttatgagctaatgtctcacagtctcaattgcgtgccacatagcaaatataaattggctgcgtacatccggtttggatgtattctaaaaagcaaatctagaaaatgcatcctcacagcacccctcatagatcatagtatgtctatctaaaaggattttttgttacaatattttctttgcataatttgcttcacccagtcagaaccctaacagccaacaggcaagggaggggaatttttttctgatcaatgcagtgccactagggaagatgagcgagcaaatccaatctcacctgcttggcgaccttggagcaagccgctgacgacgtccccgcggcgagagcgcgctcgaagcagcactcctgcgcctgcgcgagcatgagccgctccagcatcgcggaggcctcggggcccatatccaccgtgtcctccgtgtcctcctcctccccctccatcatctcccccgccgctctgaacgcccccgcggcgcgctggaactccccgcacgcagccttgaccccgcccaccgccgcccggtcgacggccgccgcgatcctcgacgaggcggcgccgacgttgaacacgacggcggccttctcgaagcggagggacgccgcggtgcgcctgaggtggggcctgaaggcgtcgtgccaggtgaaggcgaggtcgtcgtcgaagtcgcaggggtcgtcgcgcgcggaggcgaggaggcggtggtaccggagtaggagcgcgcggcgggaggcggcgtcctgggtcgtcgcctgggagctcggagcggagagggaagcgcgtgcctcccggaggtcggtgaagaaggccgagttgaagaagtggcggtcccggaagagctcggtggcggccgtcttcttctccgggacggagagcatcggcgacggcggccgcgacattgcacgcctcttggctttgacggcggcgaccggcgaaggcgaaggggatgcctgcaaaggttgctactgcaattgtaaatgctttcctggcccagctattagtagatcggcccatctgggccattgggctattacgagtttctggcccaatttcttctcaaacagttcgaaatttcgaatccacataataattccaccgatcagacactcgcgccattaatgttaacatgtctgtccatatttgtggtcatgaactcataacgatgacttgaagacgaaaaacaagactttaggaagacatgcaactatcaattcattattattgaccatagagactacagtacaaataagtaccttgccgatggcacatctcttccaaatcaagaagacacacatgaataaatacatgatagtacgtgcaagaaatgaagaaaacacaagcatcaagtaagaacagaggagagcataaaacccgtctcctctttccaagcctctttcaggaatccttaaacccttacatgctacattcaactacaaatcctgcaggtgacagacactgatacgatcactagctagtcaaatgtctaaaagaatccatctttgaaaaatcatggaaagatcgataaggatgacgcttgtaatatttggccatccttatcccagcctaaaaaatgcagccgggtttttccttgtggttttcaggaggagattggtcagagaggaaggtcgggaatgggaatgccctcgaggagttgagatattcctgcgatgtgatcgctgatcatactgtgcgatgccacaagctgtctcaaaaatttgcaacctgtgtgcatctcacaacctaggtgttcctgcgtgtaagagtggcgtgtgatgctgtttagtccttccatgcgaaggttggactgtggcaaggagggggaggacgaggaggaagagaggaggaagcggcagtggccatggctgtccctgccgccggcaccggtgccacgaggacttccggcgcggtgtaggcgtagtccatgccggtctgctcaccggccaagcgagactggaggaggaggccgtgggcgctgtccatgtcgtagtcccagacggagcttcctggcccccaagcgctgaaccacgcctcgtcggccggaccccaaatgccgccggacgtcaccgacggctggaacatggccgtgttgccgtcgctgccatgttgttcagctgtctggagctgaggattcagctcgggttctggaatgccgtcctgctctgctacgaagagcagaggcttcggttcagtgttggatgactcttctgtaggctgctgcggctgcggctgagcttgctgcgtgtggctctcgtccggtgtaggcggagccgaagaggaggaggaggagcaggaggccgcggcgctggcgctggtgcgtccgctcccgccggtgcggcctttgccaaggaagaggtcggggaagttgagccgcgcgttctcgccgcggagcttgaaggcctcgcggtcgtacgccatggctgcgtcctcggcggtgtcgaacgtgccgagccacagcctggtgcggttccgcggcaggcggatctccgccacccacttcccccagtggcgctgccgcacgccgcggtacagtttgggcggcccaggcgcgcgcagcaggtgctggtacagcgacggcggcagggcgccgccgcgcacgcctggggggctcaggttcagcgcctcgctccagtagcgcagcagcaggcgctgctgctcctccggcggcaagaactgcggcgggaacagaggagacgccgccccaaactgcggctgctgctgctgctgctgctggctactgccgaacgatatcatttgctgattctgcaagggtgattgctgctgcggcagcagaggctgcgggtacaagctggagtactgcagcagcgggaggagccttggtgccgccgcgcccggagacggatcgtacgcgaacggaaatatatgtcgcgacgatggcggctgattcggcaaggacatcgccgggggagacatggggttggagacagaggacgagtcgggggaagcaggggccgacgacagcgaggagatggagcgctggaggcgacgatcggggctgcggatcttcttctggggacggagcaatgctgcggccgccggcgcgtcttctaaaactggcaccggctgctgcgtctcggccgcggaggaggagatcgccgcgctcactcccttccccttccatctccgcccgtgcccgcgcgctcctccaccgcctccgcctccgcctctgtccaccgcgtccatcccgcccgattcacgaacacacccaacaacgccgcgcgctctcttcctcacacaccaccggtcgcgattccaccgagtgcagtaaacccggccgcccgctagagcaacaacaaaatgctgcggtaaaacgagcgagacggcggggcgggaaaggctttgggcgggcgaccggtgtgcgcgtgtgcgcggtggaggcgccgagccaatggggcgcgtggttctgattcggggacgagcgcctcggggcgaaacgggcttataaaggtgggtgatcgcgcaatcgaaaggcgaggtgggatttttttttcgatcccgtggagggttccacaggggaggaggagaaaaaaagcatgcgtcgtttgtgtggcgggaacggatcgtggtcggtgcccgggacccacgcgcattgacccgtctgcccctctcgcctcgcgacacggcggacgtcacgattcgtgccgcggcggatggggcgccgcacggatctcgaggcgtaagctgggggcaccacgtagctttcggccgctgtcacggctagacatggacggtactgatcgagaaagaagccttagactgatccatctgttgctttccttgcaatccagtattcttcttctagtctcaagtttctctccgcttcaaaaaaatcgcgttgctcctcttctctaactccagcaaagagacaatatcagcgagcgtttcaacttccaacgatccgatcttaactcgaaataatttgacggttttggacgatttgtgcaaccaatgcaagcaagatgagcatatactcctactttgcgaaacacatatcaacgtgttattggccacagtgtgcatgattagggttgtgaaagagctgcatgccgaaagggggtgaacaaactaattaactgagcttatcgtcttaattgtttagtggaagatggagctctagccacagaagacagaactgattacataatttggtcttttgctgataacaatagtagccacagaagctagtagattaacacaatgcatcaaggataactatgatctgcacaaatattgtttagtttggcaaataaaaaaattccctcttctccgtgcaccatgaaggattagcaagagatgaggtcacggcgcgcattcctgccggaacaatcaatgcaacaactcgtacggagtaagcatataaaactattgcgctgaccatttcttttagtgacatgtttatgggtgaatggtgatctctatctgtaccggaagcatatcaatcttaccaatggaggagtattatatagtcatccagttctgaagtgcttctgccttttctttcccctgctggatcaggccttatgtttgtttcgtaccctcaagcaatcaattaaaccctattttccctatttttgtcatgatctcaagtgtgctgctcggcatggtatatccctcttattttattcagttatcattttattctgaatgcataatgcactgatttttctttcctacccatcaaactgacaacaatgagtgctcgataaatcactcataactgttgagttacataagcaacgtacgatgagcagaaccttcccatttggcagtttccgaataatcagtattatgagatagtaacagccatgtgcatgcagccatatactcgaggacagaaccaagcttcccgacgaatcgtgcaaccttttgccgttgcaggctcgttcgcgaaatctccatttgcaacatttttttgaagccgaaaaatataatcataaaattcacacgcagtggttttctttcccaaccacaccgcgaatacaaaaggattgtcttcatatggttgagacgccggttaaagaactctgctgcagcagatgcagaaaatgggggaaaaaaagcttattgtgtacatactctctctgctcttgtttgaggtaaactagtactccctcgttttaggctacaagatgttttgacattgatcaaagtcaaattgctttaaatttaactaaatttataaaaaatataataatatttacattacgagtaaaatccataaccggtctctaaacttgtaccgttgtgtcatcccggtccctaaactcgcaaatcgaccattcaggtcctcaaacttatttgattgtgtcatcccgatccctaaacttgcagatcactcgtttaggtcctccaacttgttcagttgcgtcaccccggtccctaaacaggacggtctagagactttatatcaaaaaataattcataactttttcatgtgaactctaatgaagacaaactttatatcaaaattgtagccctcgacacgacctacaactttatagttgtaaagtttttgaattaaaactgtttagggtcctaaaatattgttgcatgtttatagattttgaaattttaattttaaaattacattttgggacaaaaaaatgacttagaataaaaacaattcaactacaaagttgtaaatcgcatcgagggctataagtttgatataaagtttgtctttattagaattcacatgaaaaagttatgaattatttttgaatataaagtctttagaccgtcctatttgacccagataatattcaaatccaagtttagagaccagagcgacttaactgaataagttggaggaactaaacgagtgatctgcaagtttagggaccaggatgacacggtcgaacaagtttgaggactgaacagtcgatttgcgagtttagggaccgggatgacataacggtacaagtttagggaccggtgatggattttactcttacattaccaaattagttttattaaattaataattaaatatatttttataataaatttatcttgtgtcaaaaaatatttaaatattcctatttttctataaacttaaagcagtttaactttaactaaagtctttttaaatttcaaactaaagagggtggagtattacgctatcaattttcggcaaaattttttttccgaactttcggtaatatcagctgatcaattgacatgtttcccgaaaatacgacacaagcagggaggggcgctagtcgcggtgacctttttggcatttatgcgcgcagcacgacgcaccgagagtccgtgacaaacccagaaactgtcgtgcgactgtggcttcggctgccgatcggggccccctcccccaggccctcctctcctcgctttcggcacgcacgactccaaaaactgcaccccccgcattatcagatattcagattactcccatcctctcttctccccctccaccacgtatacacgtattatacgagagcaacccaaagtccacggcgacaagccaagggtgcccagggccccatctccaccgccggccggcggcgaccaccgccctggccccacccaccaaccaaccaaaacccccctctcttcccgcgaggccgcgactcgccaacggccactgccaagcgtgcaggctgacttgccttgccccggacgggccgcgcgcgccgtcgcggagggggagggggggggggggtggttaaatggcggggagactttttgcacggtggccgacggcgacgccgcggagcgcgggtggccacacacgatgggcacgagccaacacgcacggcggccggccggccggcgcgtggacggtccgacacgtgcccgcgagacgcacctacgctacgcgctaatgattctgggactcgaacttccaaacgtggcccagcgcgcgtgtgttaattttttcaaaagtcaggggaatttagcgactgctactggcacttggacatgcatggaaaaggcgcacaaactagctagtactagtactactactctacgcgacgactacttggacaagtgcgcgagctatccagaatcgagaaccttccatgccacttatttagatgagattaaaacttttaagtacctatcacatcgaatgtttagacactaattataaatattaaacgtagactattaataaagtacatccataatcttaaactaattcacgagacgaatctattgagcataattaatccatgattagcctatgtgatgttacagtaaacattatctaattatggattaattaggctttaaaaaattatctcgtaaattagcttttatttatataattagtttagtaagtagtatatatttaatactctaaattagtgtagactaaagtcaagttcctgatacaaacaccaccttactgaaagagttgctaaacaattccatgtgtcctcgttagccccatacaaatatctgcgaagtgcttcttccaggtggcactgtttacgtaatcaattttagtcttccagaagtttgatggtgaaatattgtaccactccccccagtattttgtgtaaaatattttttgttataacctgtcttgtagttttccttagtaaaatgttttccaaatccatctacctaccatttttagtcaaatctatttaacgctagagtacatatgtactactaattatgtgggttaattgtctcaaaatttattttaatcaatttatacgtggaatgtgtgtgtgtattaggttctttaaataaggttattatggtcatttatttattctcctaatgtcttaaattaggtagaattttaatttttatgggacggaggaattattaaatattggacacactgataaaaatccaactttaacatgaaaatgtttaccttttaattaggtggattatatcatgactgtgtgttatgacctttaatttggtggattatatcatggttgtgtataatgaactttaagagtatttctattaaacaaaacatgctacacaaattatcatggactctttgcttttctttcgaaataaatataatgtcattgaaaataccatgaactcttttattagtttcattttttccaaactttaattagtattaaattcaatatactcttagcttctgcatcaactaaaaaggcacacaaccatagttaaaggcacatggatttatgatttgaatttttgttgagtatcggacttgtttggtttactacaatgtcaaaatgttgacaataccacatcgtatgaaaattttactagtgccaattttttttctacaatttatgtgtgttattagcatgtcttcatagtaaaccatacactagtcaaaactattcaaataacaataatttgatagggcacatttttttcatcaaacaaaaaatggcccatcaccacaccggtggttgtgtttccaatcgggaccattatcatactgcttgaagtagctagcgaaattgttaccagctgcaccgcacgtcagtttagcggccgtcatattacctcagacctcaatttaactatccagattacgcaatacacaatcatacatatggctgtacctgcgaagttgtgataaggtccgcgatgcagataaaatacagcacaatgattacaccctaaatatgataattacaatcgctcgatccattaatcaattcctcaccaagctaaggcacacaagtacttaacgaccttatcaagacgccacgcacggctgacgtggcctgcacggcagctgagcacggggtgcgcatcaaacagggggagagctgtggctgtgtataggagcggctcatgtgaccgagttgatcaaaggcgcgttccgaaacggattagcacgggtgattttgtttaatgctctaaattagcaagtgctttccggaagcaattgcctttcattcgcctgtgttgctaatgatgccgtgacaggtcaacccttagtgcggggggtggcagagttggcgtcaccatgctttaatttgcacgcatctctttgacttcttcctcctggatgcattaaaccagtagcacaaaaaagatcttgattttgtaaagcactctgcagttaatcactagtagggagtattatatttcagttgtgcgttctaggttagctagatatttagttagcgatccgaatatgacatggcattcatgcatgatcgctagctccaactttagcttgcaacagagtgcgataacgatcaagtcaattagctggtactactactttatgtgtctatctcatgtagtttaactccactgataaaacttgtcttgcaagagtagtagctcccttatttctcagaactagtggcaaattaattaatttctacatggaatcactccatgtttgttagattaacctggccgttgtgttaaaggactcacaagacccaacgtcatattactggtaaatcaaggccaggttaatctaaataaaatatttatagatttatcatcaattctcgaagtttatacagtttaacatcataatatttcgtttttaagattcatctttgataattatttttataatatatataattcacatgttattaaattatatttttaatagaaattgatgatacatgtttgatttgggacaaaactaaaatgacaagtgatttaaaacgtatagagtacattagttctaaaccaagcggaaatagaaaaataaacctagcaacatgttcatgacaaagaaatagtgtcaaatattgtagtactagctatacttaactagtaagtaccttacttctgaagtgtgatatttagtctctacaattatacttagaccgaggtaattctttaatggataatttatactttgaatgcgtgcacaatcctagcttagtagtagtctttttgaaatatatatagttaaaccgacctaggttgtgtggcttggtcaagaaatatatatatcaactaatcttcaggaacggacaaaaaaaagtcggcatgctttacaatttttgtacagtacaatgttatatgataggattgatagctaacctaaccacagatcgacacacaccaacggagcaacacatttatatactactattatttaggtgaaaacagacgcacaaaagaacaacattagatgataaatatctttcagatgcagtgtttattttcagcgttcataccaagctacaaaatacatcgtacgtcacaacggcgcaaaacgcctttgcaggattcgggcgatcgtctttgataatcactcgatgccacattcattcacctgaagcaaaatccaacgagctgacatttgtgttctaattcgccaaaaaagtagctagccggctagtactactgtccaacagagcccggaagcaacaaatactaatggccgagccctcaacatcagaagtggtgtagcgatgccttcatttattagttgaaggtccaaaccataattaagacgccatatgtattgcagagttgcaattggaagatacggagtagtagaagtagaaaactgaagcagaggctcacaatatcgttcgaatttcatctttgatattttgaaggtaccatatggtttgtgtcgaatttcaatcgaaattcatcaaatcctgtgaaatttgcaaactttatcacctcatgctgctgggctcgtatttcaactcaaaaaaaaagggcatgttcactttgatgtcattttcaaccttaccaaattttagtaaagttgtcaaaaaagtggctacatttagtttgctgccaaattttgataactatataagaaatgctgccaaaattttggcaactatgctaaaattttgataacttgccaataaggtttttttttggcatcaaagtgaacattcccaaaattgcaaaatgctggactatactacgtaggtagaagtgttgggcgggcattcatttggaaacattttactcactgggcccaaaaaggcctctgaagaatgggcttgatcacaagtcctcctcttcaagacctgctcaaactctcctggcttctagttttacccaatgaaaaacacaccctcatgactaaacattgaagcctggcgatgagacaaaatgaaaaatggaattgatattcactattctagatccagtgaaattaaccaataatatgcgggcactatagtgctgacgtttagttaattctgaagggcaaggagaaataatttggaggatctaattccaaataactgaaagtgaaattccactgaccgtttggagtatcgtcactgtgcagaaacagctaacaacaaaaaagacgcagctgtatcaaaagttacagaaaaaaggagaggtggagagaggagtagtagatgcttcgtgcatccgacggaaactaccaggacgccgtccatccaccacagtgaagacgacgtaggagcgtgcacgcgagctgctgattcttcttcattcttctcagattatttaccggtttactgaaacgaataacaatccgctcaataaccatgtagacaaatgtacgggaagaaattttcaatgctttttgacgtaccgtacgtaggatcgagctagcactgcgagcatttgaaggctcctcttaataagatagtatatatgtgcaggttggcccgcagtacattcgataccagcaggttgcgagcttgcgatggtccaggccgaactgaactagatcaacggaccggtgcatgtgagcaatttgcgtggatagtcattgtctctacatcgatttgttactatttcctccgtaccaatcggtcgcgttcacgatccaccggtccggaatttaccgcgcgtgtgtgcggcaaagtgctcctgtaaaataggattaactaacaatttaattacgtacgaggaaaaaaaaagaactgagcgttacggacaaattaaaacgatcgaatccaaacaaacatgaaccattatttgccgatctactagaaggttgttgcagtgtagctttcagggcatgtcagtatatcacatactgtgacatgaaagtatggatcgatggatgggatgatcgaaaagacgagaaagtagcagtcgatgtggtcatgtggaattgttaagttgattttttttagactgaggatgcatagcctgagaacagacagcccatcggagtgtcctctactcccttacgtttatcccaagttcccaaccccatgaatctgacttttttcaagctaaatagaagtcaacggggcaacattattagatgcatgattagatcgaacaaaacaccgcgagagaagtgcagcagcaaatgcgcccgcccgctcctgtttgcattggttgatagctagctgtgcgctggacatgagaaagacttggaaagttcgtgttaaattcgtgcaaaacttcctactacgttaaaattaggctgcaagcatgccacgtttcatcggcgcatcgatccaataattgcgattttttccccgactgcagttggacaaaacaaatgacaactaacacagttgatgatcacactgtcgcgcagtcgcaccggccactagcaagatcgaggaagcaaacagttttttctaaaatctgcaggtacatgagcaatgcatatatgcattgcagctggagttcgaccaggatataggagtcatcgacaaacacctcgatctccaattgattggcgtgtaaatgcgacaacgatagatacataatacatacagatcccctctgaggctgtgacgcatagtcaggttctcttctcaccgacgtccatgtactcctccccagatcgatcagctcccgtcctgctagctaagctacacatactactatgcgttaagtttcggctccttcactcgtgattgcatgtgccaccatgtccccagactcccagagcgatcgaggtacaattttgtacacgcgtgcaggtgcagatggagagagagagagagagagagagggagagagggagagagagagagagagagagagagagatgaggcaccaaccacaggtacgcccgctgcaggagggagtgagaggccccgtgcggaactgtggatgcatatgtgtgtccgccgcacggaaacggatctgtgtatcatcctgtagagagatggaacctggaaccagtcgagactgcgtggtctgcgtgtgtggtgtttgcccctgaaatcgcttgccgcttggcgttgtggcggtcggccggcattcgcggattgcgcggttcgggggggggggggggggggggcaatcgatcgacatggcaagggagcgcatgccggccgtaatcgttcaggacacgcacggagcggcacgcacgtacggcctacgtgcatcatatcgatcgatccgtcgatctcggacggtgtggcaaatgcaagtgaggggcgtacgtggcacgaaggcctccgctcgatccatcgggtattcccggctggtaaattctcggctaagggggtgtttatattttggggggggggggggggggctagcggtgtaaaattttgacgtgccacatagatattatgtagggtgttgcatgaagtgttcggacactaataaaaacactaattacataatccgtcagttaaccgcgagacaaatttattaagcctaattaatccgtcattagcaaatatttactgtagcaccacattgtcaaatcatggagcaactatacttaaaatattcgactcgcaaattagtcgtaatctatgcaattagttatatttttagtctatatttaatactttatacaggtgtttaaacgttctgtgatatcccagggcttaataggattaatagaatactcatatcaacgagttgcaacttctttttcggaaaccgatctccaaagaactccagggttaagcgtgcttggcctggagcaatttgggatgggtgaccgaccgagaaattcttcccgggtgcgcacgagtgaggacaaagtgtgcagaaaagacatgtgttggtctgtgagggcattctatgacctatgaaagctatcagatgtaagcgggcccggcctgggggaaggcgggactttacaaagtggtatcagagccgactctcacggtttcacgggcaaaagctatcagatgtaagcgggcccggcctgggggaaggcggaacgttacaaagtggtatcagagccgactctcacggtttcacgggcgcgtgtgtcacagttgcgcaggcatggtgcgcatggctggtgtggaccgggagtggtcacacagcattagatgtaagcgagcccggcctgggggaaggcgggacgttacacgttcgatgtgacatgatgaaaaattttagggtgggatctatacagggtctaagtaaaaaaaaaagaagaagcagccttttctgcttctcatcatcatcgtgcagcccataagttaattattgcaagagtatcagaggccttcatgctgtcgacattctcctctccccgtaatttgatataatcgcgtactcagaaagtcaacccgtcttactgcatgtagtataacataatgtgcatgggcatcagggactaacgaatggttcatgtcagcgtgtgatgcagtgatggcctccagagtcctgggcatatggaatcttcagtggaaagatcagcctctccttccttttatcttctttagaacaaccaaacactgcgtccccatgattttctactattttcctcagccctgcaacaatcttttcaggtgttcggctcaccgatgcaccacgtgccttagatctactaccaccactgggccctggctacaggttacaagcatctaaaatacggtgtaactgcgctacaaattaaacaatgcactgttaagcgaactgctatttttccggctgatcatgtcattgctgcaggtggcatggcacggggcctactggtgcaacaagatccgcttgcaatattgaacagttgtttctttcgctggggtcaacaacccctgtatccatcgctcatcgctggcttgggtggcgggtagctggtggagtactactcctggtttttaatctgtgatgcagagtccaacgttttttttttttttttggcagatggactgtgtgctgatcatgtggcactgtcttggtgtggtgccatgacgcagtatgtaggggcgcgtcatttcacggatccgctgcttttctcagctttcatctttgtgtgcatatatggcgtgtgtgctggatatgtactgtatgtctacatgtgctctgttgaatgagatatttatgttggttcccttgtttccttctgcctgcgtgctgcgattatatatacttgttataagcagtagtgttgctgcatcaggcagttgaaattataagtcgttggatctcagctgatagcagaagccataatttgtttattggcttcttcttcttacagattaatcaattgaaactatcaattcttgtgtgacaactgacaaggcttaatttggtggtaggaagggtactggtacatgcatgcagagaagccggtgccggcgatcgaggacgccggagaaggtcggaatttatgaaacagtggcttgatttgtcatacaactccagagctgtatatgcataaaaagctggatggacgaggaccacaaacagcttgaaatgacacgataccagattgcggtggagccgcgatccgcccgatcgtcccgaaaatttcaagattggaatgaggagagacctgtagtagtagtatatgagcctggtttattacaaactttttcttcaaacttttaacttttccatcacatcaaaacttttctacgtatataaattttcaacttttccatcacatcattttaatttcaaccaaaatttcaattttaacgtgacctaaacacactcatggttgggtcatttgatactagtatttgtttgggacaccagtcatctcatcatccccataggcaattcggcgttcggcactgcagagaacattcttcttttcagatccgtgacagttgtgacatatgcaacagtactgtagcgactgatttttcttcagtaattaaagccatgtaagctcggaaacaatttttactgcttgctgagccaccgtcgcagggatttttacccgtcacatcgcaacgtgtgggtatgcagtaccgtcgggcgtcggcagtctcgttgatctcgaaagaacgaagagcgcaaacgagtgcaagtaaagagaagcgaagcgactcacgcatagtacgcagaatatagtttgcactttgcaggacaggattatcatcaggattttaatcggctgcgaaagtgaacaaataacacggcctcacgtacaagcactactgggaatcatatatacgaaacctgtaatgggcgatcgatcgcccagcctacgggggtggcgatcggataggcccccctctctttctccactggtttccttttttgacaccgcattacttttctattttagtaaatttatgcatctaaagtttatggacgtgactacacagctagtggtaactggtttgtctatgatagacactatccatttatacttcaaatacaattttctctaaaactgcttatccgatctacgatccgattataccgttgtgttcgtaacaattaaatatttataacaagatctcacatgattatattttgatgaaaaatataaattacttttataatatatctaaattacttttagatttcactaagttacttcttagacatataaaagtaattcaataaagcctaaaagtaatttacatatactatagaaataacttataaaaaaagaaagtaacttctataatatatgttaattactttaaaactttattgaattcacttttatatgtttaataagtaacttagtgaaatctaaaagtaatttagatatattataaaagtaatttgtgattttttatcaaaatataaccatgtgagatcttgttgtaaagatttaattgttatgaacacaacggtgtaatcggatcgtagatcggatgagtagtttaagagaaaattgtatttgaagcatagatggtaggaatattttttctacttgcttgatcaattagtactgtagtaaattaagattcttcaagacacatatctggacaatggctagcgtcgctcgttatgactaaatcgagagcgctctcgatttagattttgcgaaagtttatacgcctcaagtttacacaactaaagtttagagaccaaaagtttataagtcaaaagtttatatatccgattcaaatttgaatttgaattcaaatatttttcatatatagtatttctatacatctaaagtttatatacctaaagtttattgacccaaagtttataagtcaaaagtttatatacccgtttcaaatttgaatttgaattatatctgattcaaatttgaattcaaatattttttatatatagtatttctatacatctaaagtttatacacctaaagtttatagacctgaagtttataagtcaaaagtttacatacacaattcaaatttgaatttgaattcaaatattttctatatatagtatttctatacatataaagtttatacacctaaagtttatagatccaaagtttataagtcaagagtttacatagccgattcaaatttgaattcaaattttttatatatagtatttctatacataaatttttctaactttttgtttttaatttttttttggtgtactataatagaaagagaagaatgggaggaggaaggggagaatgggaggaggaaggggagaatgggaggaggaaggggagagagagggggagtagggggcggacgggtgatcgctccgcctattaggcgtgccctcatatatactcttctgtttctaaatattattagatgccgttgatttttttaaaatatttttgaccgtttatcttattcaataatgacggagctcgtggcccctcaccgggagaccgcgcaggcccccctttgccggttcggccgggggcttagggtgagatctcaagctctctctgtgtgtggaaagatcgcgtgccaggaagaaacgcgagacacggacgatgtatacaggttcgggccgctgggaagcgtaataccctactcctgtgttttttggtggatctgtgtaagagcaagttacaaaatatcaaccagccctctcctctcccgggaaaatccagcccccgctctttgtgggcatggtcctccttttatatcttaaggggataccacatgtacccttccctttccaaactggacttttcttctctttatggacggagattggtatggttgccgtccgaatgacacttcgatgggacagcccacacctacctccactcccggcggagacaggcgcaacgcgggatcgtggctgtctgatgctgacgcgaccagtgtcagaccggtcacagatcagtcattcttgtcctctatgcgtcagttcagcgatctgcatgatcacccttctttttgtagcatcctgcctgtaatggttgggatgaagcctggtattcatctaaccagggctaacgtgccatctctaagaggtaacacgctagctccggctggagacgtgtgcctagagactctcgtcttgacgggacggggcgaggcgtgcgtcagaccgccagtcgccacctaaccgttgatctgaccggtctgtgactggtcacagaccggataaaagatcgcgctgcattgcgctgcatgcagcgtgacacgcttgaccagaccgcaataaatgcggttaggtgagccctaccgtgttcacccaacctatgtacatagtgcaaaccccacagggggtcggggcacctcggccctcggggtcggggcaggagcaacccgaccccccccctcggggaaatcaggaggagggcggacacctcaccctcgggcccgacgtccccgaaggtgccaggccacgtgggcgattccatctgcctcaagcctccgggcgcaatacccccggtcccatatcaccgacaaataacttttgtgaattatgtaaaactatatgtatatataaaagtatatttaacaatacatctaatgatagaacaagaattaataattaattaaattttttgagtaagatgaacggtcaaatatatttaaaaaaattaacggtgtcaaatatttagggacggagggagtattatgttgagctcgctgcccaagtgtaccaccccacggtgaaccgcgcacgtaacacaataacgctctgagaaagattggtgccctcaccatcaaaccgcgcgtggacacgatttctccccagatccctggttggaatcggtcagggtctctctctcactccctctagtccatatccaaataagatgctgcatgctgggtgcttgccactttggtagaacctaacacatgatttctaaaccgaattcacatgaatcggctcaaattgggttagaaactgtgagataaatccacattgatccagtaacgaaccagatcatgaagacgtgggtattgttctttcatgttttttgcgtgcccactggccgtggccggccggccggctaactttcggtcggggcgttgttgttgcatgcgtccgtacgcgcgtgaggtgtccccggccctgaccctgacaccgatcgagaaacaacgggtaggtgacgccgtgacggtggtggccactggccagtgtagctagctggatcgcgagcatgcatgtactagacaagaggtgaacgtacgcacgtcgcgttgtagctggctagcttgagatcggggaactggtaaccattattccccacgtcgcgtaggctgaaattgtaaaattgggtactgagccaaacaatctccaagtaccgtggtacgacacgggggcaaattgcgcggtccctaagctagttcgagttggacttggacgcgctgccggccgcggccagattccgaagtcctctcctccccgtgttactggagtctactagtgccagtctgccagactaatcgtcatatgtattcacggcgcatatgctcctgctcgtcggcccgtgtcctctccgcgctcaacagcctcaactctcatgtcactcatacgtacgtaacgctagctagcgtagcacacgccgtcgaacgtcactacacacttcaattcaccaaagagattaaatctaaaactcggtacttcttcggtcccataaaacacgtatcccatggtagatttacattttatacgaggaaaatattatatgtacttacaagacagctaggctttgctatccttaatgatgttgacaccgcgcgattagagactagctaacatcaacgtcacaatcaaccagttcgaaattaatttgattggatgacgctggtatatgcatgttggcatccacatgatcgactcactatagcaatacgtacaaataatcaactcctgaaggtatacgagctgttcgaattcgatcggatgaattcaggatgggcaacagtttgttcacgttgctccagcgcagtgcgttatttctaaatatgaatgcaatgcaattggctccctttcacggggtacagttaggataagattggaacgctctgcatggtgtgccaggtagcacacgctgcgcgcctatcgaaatccaaaacgtgtgtttgtgctttgcccgttttatcgagaagacgagtactcgtgtgcacaaaaatatatatattcaagacgtgtgggtctagctccagctaaaggggtagtactatcttaagctgctgttttaatccggagttacgtactaaattataccatatcgtgtccacgtgtaccatttggtgcgttatcaattttagtacgtactcctcaattcacgtggccagcactgtgctctgcgaacctgcgatggggcacttgtggaggcatgtctcagttgtggcgttagctgatgacatacttgatgaccgcagcttagtgagagaatcatctcacacgcgaaactaattgaaacggagtagtgttaattactccatccggactgataatacttttttttagacgagagtaggattaaactttaaaatatttaattgtaaatcatttttaaaatatttaccttttaaatctggtgactatactcttgtctaaaataatactctctccgtttcacaatgtaaatcattttagcatttaccatatacatattgatgttaataaatctagacatatatatctatctagattcattaatatcaatataaatgtgacaaatgttaaaatgacttacattgtgaaacatagaaagtaagtattatcaacccggagggagtatcaacaagccgaagaaaatggaggggagtaagggaatatcgaaagtagaagtgattagtaaaaaaaaaatgcagttgggtactctgggacagctagctgctttacagagagagaaggggttttgacgtcatgctggcatatgtgcttctataaaaaaaatacgtacttttatttttcgaaattagcatatgtactaatgtacgtccccgtggatgcagcgcgacggtgacgtccgcaaaactcaataagcttacactggaactattcaagtttgatattatatcagcacacagatttttcaggagattttgtaggtgcaccatatttactagggtaaggagtagcttaactcaattataagttcttgtgactttattaatattaaaatatttttgtaaagtctttcaaaggtacttatataaaataaattacgtgtttatagagattagtgtacgagagtgtacatgatggtggcgtacgttgtgtgttttaaaagaagaaaacggtgaccatgaacttgcacaattagcacggtgaatgtcgcatgccacttgtaaaagttacagaaaaaaaagttagccactcctataattgccacccataattctgtaccagttgcgcttcatccgatcaatctgcactccacttaggttaggtacgacgcacacatgtgtcgatcgttccaaaagtcaccgatcgataatcgatcgatcttggcagatctcgatcgtctcgtctgcgcatgcatgcatgactcctccatgctcgacccgagatccatcgacacgctactgtgcgccggccggcatcttccgggatcgatcgctcgcccaactgcccacgcgatcgagctccgagacaggggcgcacatataatggccggggacccggtgccatggccgcgcgccggtggtcctgcaatgcctgctgtgcacggtacccccccccccccccccccccggctgccgccgatggatcgatcgatcgttcgcctcctgctggtggtagtactgggattttcggcgttttcacgggcagatcggcctaaaaggcgtcccctccctcacgccccccgtccccgcgcatggtggcccgtgacatgtgagagatgagacggccggttttacagctcgacctacccctagccacgtacaccggcgcgcgaatcggcggccaccgcgggcctctcgcgggtcggtcgtacgcgcgcacggtccagaccgctggcaaaggggccagccgcggccgaacgcgagggagctagcgtgtaccaggggctcgcggcgccggatcgtcgtcggacgccgataattttgcgcgcgtggctggacgtgtgttgctttggcgtgggacgtcattcgaggggcacgagacacggccggatccaacgtcggctcgcgctgtgtggtgtacgtgtctcgagcgtacacatacgtaccggtgagtttccgaagggattcttttatttttctttttctcaacttcggtagcttttgtgtggtcctcgtacgtgacgcgcatgtggggcgcgcgtatgatgtgtttttcctctttacgtacgtgcttggtgtgctgccgtgctggcatgcacggcctaattttagcttgcatttttttatatataaataatgacgtattagcttgcttgctagctcctcccctccaaaaaatacaagcatgtctacatttgcaattttccatggtgtttttttagagcaatgctcctccaattcatccgagcaatgtatttgctcccaggcagttgcattgtagggtgtgatatttcctaaccaattactcactccggtttattttgtaagaagttttaaacttttttaagtttaacaaaacttatagaaaaaatttagcaacatctacaccatattttgatgtgttagaaatgttactacgttttctataaatttagtcaaacttaaaaaaaatttaattatgaaaaaagtcaaaacgtctaataatataaaacaaagggaatactatattgttaggggcattagaataattttatgtcaaccttaatttctgctaaaactctagtatttccttcatcctgtagtaagtttattttttctatttgttccaaaataaatttatactttaaaacaatcattgcattagagtttgtgagagtagagaatatttgtgattttgataaagtagggatattatagtgtttttattttgtattggtatgtatgagatgtgtgagtaataaatttttttggacaaaggtagtagtgttcatatttatgaattgatggctcttggtgctatcctaaatccattgagtttgaacgcactctactaaaaaatcaacccaaaatccttaggcacatcataaaaatttgtcaaatagttcgtcggtactaagtcgtaggtaaagttagttgcgcttaatttccaacatgttctaatttttttctttaaccccattcctttggtgaacgctctcctttttttctttctttctttctacctcagcctcttgcacaatcactgtctccatcgttgatgcagatggtccaataattcgaagtcaaccttagcaagcacttctatctaggaattatattccatcacacaaccgacattattccacattttatttgagagatgaggataacctcaccaacgcacaaccccactcaaaacaacatcgaaacatggtagtcgtcatcaatttttctcataattcggcatgatccttctccttggctgatgatgtatcataggaccacgacttagggaaagcagccaagggatagtgataggtgtaccatgctaagatttgatcttaaaaaggctatgtgagtcaagtaacataagtatacaaataaatttggattgtaagttggaagtcccattccaagtcgaaagtctattgaaaatagcttggccaacgatatgtgtacattaactttagatggacacattgaacgttgcaatccaaaatatgcgcacacaaaaaataacttccatccggtgaaattcaatagcttcggccactgttacattgtaccagcagatgccttaaatttcaagtccctccagcccgtttccacgtaaggtttgacagcgcaaacgcacaattccatccctgctgcgacagtgtgcaaccgttttccgtccccacaaaacgggagcagaaatgacgccgccgcgcggaggttggagggagcaaatcatctcgtctcgtcaccaaaaatccgaaacgccacagcagcaccggccccgatcgaaacgctaggccggccggccgccctccgaaacggcgcgagatacgttaactcccctgtcgcggggaatgaaaattaccgccatgtggacaccccactgacagccgggccccacagcgccagcttacatccatcgggtcaaggaggcccaggacgtttccacgcatggcctttgcctccggcttcgccagtttaccgggcagcgagcagtaaccggcggtaacagcaccggccgccaccacaccattggcacggacaagcgacaattaccgcgataataacaacgacggcggtggcggcggcggcagcagcagcagcagccgcaccaaccacccttaagtaagacgagcggaggcgggccgcgggcgagggaaaggaggaagccacgggtcgctcgctcgtggtagtggtggtggatctgacacccacttcgctacgacttcccccatcccttcctccctccctccctccagtcctcttctcttctcccctcctcccacacctctcccctacctcgtctcatcgtgctcttcgcacccgcgcgattccgccccacgagcgccggcctccgcttcgatctccgcgacgggggccaatgccggcggcgcgatgagcgtggaggaggaggtggtgggggaggaggaggaggaggagctgttctacgagtcgctcgatcgcatcctctcgtcgtcgggctcctccacctcggcctcggacgacgatggggaccacccgcgccgccgccgcgggtacgacgcgggggcggcggccgcggccgcggcgctcgacctgtggacctccgagccggcgcccatccaggagcgacggcggcggctgctccagctgatgggcctctccggtgacccgtcgctcgcgcgattcgagaggggccgatcggctccatgcgacgccgtgggcccgctgccgtcctcgccggttgcgcggtccagatcgagcggcgccacgccggcatccgccgcgaaacccccgctcggaggaggccgcttgcgcggagcctcgtccgatgtgtcagatgccacgttggaggctgttgaggaggacccaaggtgcttgatcagaaacctcgacgacggcagcgagttcctggtgagagaggagttcggtctccgtgaggtcggtacggggcggcagctcaccatggaggagttcgagttgttcatcggccgctcacccatcgtccaagagctcatgcgccgccagagcgtggtcaattccaactcaaactccaattcccaaagtggcgcttccactcccattgagaggtccagctccggctccagcaatggtggggcgcgctacaagcggcgcaacagctggctccgcagcctccgcagtgcagctggctccatggttacatacactcgtgaccgccgcagcagcgacgagaaggatacatcctcagataagggtgggcatcgctccagctcggctacggatgacagccaagatggtgttgcaaaccatggcccggaccgtgttaaggttcggcagtatggtaaatcctataaggagctcagtggcttgttcatgaaccaggatataaaggcgcacagtgggtccatttggagcatcaagtttagtcctgatgggcactttctcgcaagtgctggtgaggattgtgtcatccatgtctgggaggtgttggagtggaagatgatagaggagaaggggttggaagaaaatggggtctttgatccagagtcgatgttggtatccacggcttcagagggaagccatcgggagaagaagctgcgggcaaaggcagtacacaatcagagatcagtaagctcagaccggttgatggtgccagaacatgtgtttgcactatcagagaaacccgtgataacctttgcagggcattctgaggatgtgcttgaccttagctggtccaaatctcaggtaacactcaaaatgctgctatatgcttgtcaattcgaatatgcaaatatttgttttttttggtatactcctgtgatacatactctgctggattgtagtatgtgtgccatcagacatcaggataatagtcacaataattaggtcttaactctttaaagttaaaaacttatgaagctattgccaaattagcagtaccaatgtctcatctaaccttgagaagtcatctagatctctggtatactgcaatgctactgaaaagggaaaaaaaggatgttggagatttgaacaaattggaattacacaaattgattgctcgcaatgttctgttattcgcaaataattctgttagatggttgtttataatacatcagtgcaattgtaccctttccaacctctaagtcatgttttataaagcatgcaacttttttgctgcttcatggtgacttaagtttttcatgttgagaacatctagaaaatccagcacctgttggtcaaaggataaaacattttgaatgtcagttcattcagttccatataactactaatctgttgatttaggtctctctttcactgcagtattaaaaacttttccattgataaatagattcaagttttttgatcatcaggtcaaaggagatattaagtttttcaatagattctgtagtctacagtgtactccaatcaacagaagatatttattccatcactaattagtatcacccagaagtgattgaatgtcatgagctaagtagctaactattttatgtgttgacatgacatgaggtcagtctttattgttcaaaggtgtgatttaatattcattatgtttttagtggagtttcaaaaggtgaaaaaaatagtgcacaagaatatttatgcacggttctttgaaaagaaatatgtccagcccccaaatgctagatgcatgattacagtgtataacttcagcaaattttgttaagcaacataaagagttaattgaagtttgtcgcctgccagattattgatgccaatctaccaagctagaagtcaatttcaatgtgttgttttaccttttgcattagacaagtgggcgcatatagtattaacgcagtaacattccttcaagatattgtatgacgttcataaggcttctgtatgctgttttaagctaccagtacatgacttgtgacatgctcttatactggtcccctaattaggtggacatttaacaggttgctgttgggtatgaaattattgctggtgggtttaatggagataaagttcatctagtactacaaacttaaagcgagtacaaatgggcatctcttcatgtaccttgtataaacttgtctgcctccaattctgcacaagaaatataaagtaggatagaagaggtctctcttggaaacagcattaaggtggatgtagctaattaagaattaaccatcttactgaaaaacttaaggccttaaactgttaaaaggtggacaatctacttatagtataaaacttgaactcagtccacatgcaaggccaatcaactctccaaggtttagaaatctaaacttatgttattgcttatcaggctccgtcactaaactttaggagtctctttggcagcaaaactccgtgctagtttggcagtctgttcaatttgtatttctgattatgtaggcctgtccaactatttattagtggaaataggttaaggagatgatttgtaccaaattttaacactagcatattccacctacaaatgttacgatggactcatttgtcttcaaagtgcagtttttcacaacccaaagctaaatttgtagctcagggacctcatcagacgttcatgaaagctttaagggtgtaggaatatattagcataattcattcattttattatgattttgttgtatttaacagttaccccagcaccccttatctccacttttcaatttctgtgcagtacttgctttcatcttcaatggataaaactgtacggttgtggcacgtgtcaagcacttactgtttgaaaaccttctcccacagtgactatggtaagagcatcgctttcaatagatcaatatctcttcctcaccccatgtattgtccttctctcatatcaatttcttgattcagtgacttgcatccagttcaatcctgttaatgataaatacttcattagtggttccctggataaaaaggttcgaatttggagtatacaagaacgcaaaattgttgactggattgatctgcatgaaatgatcacagctgcctgttatacccctgatggacaggtttaacttgcttcttgttctacaatttttcagcaggggtttgcttgctttttttcatgttcattcaaacaccttgttttttactctttgtgaagggtgcactcgttggctcccacaagggcaagtgccatgtctacgatatttctggtaaccctcctctctcattacttaattgctgcacatgtaatctcccacatctttaacttatttattccaagacctggtactgatagttggtactccctcctttccaaaaatataaacacatctagcatttgaaattcgtaccaatatttaagcatttctagcactttttagtattacttgtcccattaatcaccttcaattcaattttttcccatcttatttcttaccccccaagcatccctcatttactgggaggcactaaagtctcttgtccttaaccttattatgtactaaacaacctagaaatgcttatattttggaaacggagggagtatatgctatgttaagcttccatctactgccattgtcatattatataaattgcctcctataccttgcaaacttattttatttttgtcttttgcctagataatatgcttaagcacaagaaacagattgatctacatattaagaaaaggaaatctagccagaagaaaatcacaggaattcaggtgcttactctgaagtagcattttaaatatgatactacttgtagatcaatctgagtatgaatcaaatcgcaccagaattggtttttcattttacttgttttgtaccattacttattagtcgttcttcaaatagtttgttccagggagttcttcaaaggtcatcatcacatctgcagattcacgaattcgagttattgacagttttgaactagtttgcaaatttaaaggtaattagtgttgatcttattaatcctggccacactatttgttattaaatcgtctcgtattcagctggtggttgttttcatttccatgtttgtaactcatcttgtttcaggctttcgtaacaccaacagccaaatttctgcttgttcagctgtgaaagggagatatcttatctctgcaagtgaggattcccatgtatatatgtggagatgtaatgatgattccgaaccaaacacaaagaagggcattgtttctatcacaaatacccatgaacacttccactgcgagggtgtgacagttgctgtttcttggccttgtgccagcagcacaatgacatctagagaatggcctgagaatggcctgtctggatctgagcttgataaagatcaggagatgcctgatgctcagcaccagagcaacatcatcagaaacaccaacccaaatcataatggtgatacatctgcgacttggtctgaagaactcatgacaccaacaaaacagagcccgcggtctagtgccagccatcctatggagggagatcaagctccgagtcattcggcctggggcttggtgattgtcacagcaggccatgagggtcatatcagaacatttcagaacttcggctttcccgttagagtatagcatatggacctggatgctgagtcatcctgcaggagtgtagttttgtgtatagaatacacggaaatatatattcaatgagatgcacagcattgggttgggggattggatttggttgctccttggtgcgcctgcttcagaatttggaatcttcgactaacacatggtcagtactcaggtacttgtggtatgacattcattttagatattacctcaaattgtacatgaaagtgaatccctagaaagagtaatgctgtccgctggttggagtgacatctttcgccctcatcttcaacctttgctccacttttttttaatactccctactatgtattcttgtaaggggaaaaaaatcagtgctacagaaaagagatgcaaaagaaaattacgtattgtgggcagtgggcgtgtggtgaaattctttacattgaatttgtggtgtcatggagttctgagcttgcgatacttaactgtttaagcttctatcatatgctattggaaattggatgcatgcgaagatagcttataaaaacagcataattttaggcctacctggaacgcttctcttggtcattttctgttttcttgtagtcgtgagatttatatacggatagacatggacttcccaaacctcatggaagtatacatggtacacttgttcatatatattatacttatgtcttaaaatataacaatttctattcctactattataaaaattgaagacattttcacagaaattttggtgcgtcatctgtgttatattttgtccgtatccaattcgaatttgtcgtttaaattgacagagtatttatcaatttattaattgtgaaaattatctttacctgttgcaacgcacatatatttttgctagtctaatattataataaaaatatatatctcaaaatatgacaactcaatattggattaggaacaagctagtactacgagcttaatcgattaaggttggaggaaagtagtcctctaacaaatacacaaggttaattagcaggtgtaagcacatgtcggtaaccgtgggagtgagtcatccgtgaaacacagactctgggaggcatccgtgaaatttcaactagaatcgcctgtgttttgagagaacttaagataagattaagtgtaggcacacaaaacaagacaaacatttaacgtatgattaattgaattttaatttttatacactttaaagtaaatttatttaatatttttaaaacaacttttatatagaaagtttttaataaaacagtttgaaaatcacattaataggacaactgaaattgtgcacgtcattttgggctttgttctaacccaacctattgtatcgtttgtccaattacaacatttctgacaatattcgttatgaagttccatacaacccaaaacgctttatatcaaataggatgatgcagacaggttacaagtaggattagaaaaacagaaaaagaaaacattacactttagcattagtattatctctctgatctgcactcgtctttccttttattccttttattttttcattgatgttttagccaaacaatgatgggatatcaatttgatgatcaaacttccgatggggacggtgtcggacggggccaggtggccaaccacccaacctaatgccgaacaataccgagagagctcgacagccactatcacacacacgagacgtgccagtctcgcactcctccgccgaccgtggcccatcatcccatccagagacggaataggaaaaaaagtatatatatatatatatatatatatatatatatatatatatatatatatatagtaaatttgtttggtgctccatggtgcccgggcaccattgttgaaattgagtatatacccaattcaaatgagcatgaaacttttttaattatttatgtattaatattaactactttactaactagttgaaagcaagtttgaactgaatttgaacttgtttttgttagattttgattctaggtatatagcatccatacatataattagttaggtatgtaatcatggattgtgaaataaagttaaatttgagttgttttgttgataggtataggtatgaatcgaattcttataactaggtatatactcacaatttgaaaattttgaaaaatttgagtgattttgtgcatttgaaaccatggtgcccgggcaccatggtgccccatatgagtgtcctatatatatatatatatatatatatatatatatatatatatatatataaagcagaaagaaatacccgcgaattaacgtggtgggataaccgtaggccgtagccgcgtccatctcgccctcgccccaccacctaccaaaattgatggacaccaaaataaatccgcccccctcctctcttcccccaatccgatccgatcagacgcctagtttagggtttcagagctttctccccacctctcccctcccctcccccccctctctctgtcgtcctcttcctcccgctcgcgtccgccattgacgcggcgcggcgcacgagctccccctcagatctgaccaatccacaccgcgaaccctctcacctgacgcaaccccgaatcttgcctggaacggcgaagaattcgaacacaaatctgaagcacaccgtcgtcactaagaccacacactacatctgatttttttttgtttctccacaccctgattgtttctagatttttttttattctcgtttcggacgcttcataagaacagatctgcgagcgagttcgcggatcttatctatctgtgtgagaaccaagacccttttgttgcctgtggacacgatccgaacgaactttgacctgaggattcgtttgagatctgtttgctgctggtctcgagagaatgatcaggtcgatggtatatttcgggaacacctccatcggcgaggtggaggtgtggcccagcggcgacgcgagcctggcagcggcagcgtgggctcgagagatccgcgttgaccgcctttccccgcccagcgagcggtgccagccgctcgccgtgatgcataccgtggccgtcggtgctcgctgcctcgtcatggagtccaggctgcccaaggcagcggatgagccaccccagcctctcgtcgccatgcacgctgcttgcctcaaggaaaacaaggtatataaattattcctgacataaaaaaaaggagattcacgcagtgaaaaaaaggggacaaattcaacaaataatggaatctctctaattttacatggacatttttcaaggaatcacactaattttacatgatcgggttgaaggaatatttgtaatcttacttggacaagtttaccaggacataatcttaataatatttattgtattaataagcatgttaattttatctaaacaatcactcgggtgtggacaaggaattttcaaggatgtggacggatgactgaatgcactgaaatttgttcagtgctgatacggacttaaaacttacacaaggaatcactttatatacgttatgttctgtggacttggacttgcttttaattcattgtcatctcattaatagagtttgaacttggctttactgggattatttgagaggagtagagattaaaaaatgcagaaaccaggcactgaatgctgtagattttggtgtttagttgctgggactaaaaagctgatggttgtgagaggtggtttctgtttgatatttgtggacttaaaatgatattgagcataatgcccatcgttaattgctactgttagttttattctaactgaactggaatttagatcataatttgtgacaacaacttgaaggaacatataaggtttaactggtgcactctcaagtgctatttgaatcttgattttcacaagaatatacttgaagagcagctgagctaatggttttctagatattttatttatccctctcaagtgctgtttgaatcttgatttcacaagaatatacgtgaagagcagctgtgctaatggttttcttgacatttattgggttttgtggttccaaataattttgtatttaatgagagctacttttagtattttcagttcaactgatgttactttggcatgaacatttccaacttcatttctttttctgttttaaaattcaggagtgtggtttacagcagagtcagattccatactttagaaccacaattctaacctttttgtagtttcttataccccccttttccctgttaaaacgtacaaggtatattagtctacagaacttcatgggtttgttataaaacttccatctttgtcttcttatcgaaaaaaatattcatattgcagcttttaattcattcttgcagactgcagttgttccactaggagaggaagaattgcatttagtggcaatgacatccaggagaaacctgacaaatcacgcatgtttctggggatataaagtgccatttggtttgtacaattcttgcttgactatgttaaatctccggtgccttgggatcgtatttgaccttgatgagacactgattgtcgccaatactacacggtcttttgaggacagaattgacgcgcttcagagaaagttgagcaatgagactgatccacagcgcataaacggtatgatagcggagattaagaggtaccaagatgataagtctatcctaaagcagtacattgaaggtgatcaggtctatgatgatggaaaaatgtataaagtgcaacctgagttggttccgccattatccgataaccatcaaccaatgacacgtccagttatacgattacaagagaagaatattatcttgacgagaataaatcctttggtatgtgattcattagttgaatttgcattacaactgttttcacgagcatatattggtcagcagatagatacattgtgattccagtttatgctggatgtctttttgaattttccttgcacatcatacctcctaggagtcttatatttgtgctgtctagtatgcagttgacttgttccttgatctctctctctcattatcaagaaaggttctctagaatttacatgcattctctattgggaaaatagaagtttgtaagttgagcaatagcaatgacagttcagcgtgccttttcacattgctttgatgtggcctgactttggttgcataagtttgtacaaaacttccaggctaaggctttttttttttttttttgtgtagataagggataccagtgttcttgtacgtttaaggccagcatgggaggatctccggagctacttgattgctagaggtcgcaaacgttttgaggtctatgtgtgtacaatggctgagagagactacgccttagaaatgtggaggttgcttgatccagactcaagattgattaactctgttcaacttaatgacagaatggtgtgtgtaaaatctggtatgtgtctcttttctgattaagtatgtcatgaacttagtacaatgttgttttcaaatgttccacaattagagctctggtcatgattgcagcttcaatgcttccatcaccctttatgcatattgtttgatccatcctactgaagctaacagcgactttttttttctaggtttaagaaagtccttgctgaatgttttccatgatggatcctgccatcctggaatggccctagtaattgatgaccgactcaaagtctgggatgagaaggatcaatctagagttcatgtggttcctgcattcactccatattatgcaccacaagcagaggtaacggtcatgctccataccaatgcaaatagtatcttcttgcttggacactaaagaatctccttcaactttacaggcaaactgttctatcccagttctctgtgtcgccaggaatgttgcatgcaatgttagagggggcttctttaagtaagattatcggctctgctaatgcgctttccatattatatatcatgggctcatggtactctactatcaaactaagtcggactgattgacatagaactttcatgattcaatttgcagggactttgatgaaggcctcttaccaagaattagcaatgttttttatgaggatgaaatcaatgaaatcccatctgctccagatgttggcaattatttgatttcagaggtaaaaaaattggtaaatgcaatgctaccatgttcacctctcagtaattaactgttcttctgatcttcattaggatgagaatgttgcggcagtgaatggaaacagggatccattggcttttgatggtatggctgatgctgaggttgaaaggagaatgaaggtttgagctctttgcgcctttatctggatgtttgattgtgggctgacaaaatcacaaaaagaagagacatccaagaataattcatagaaagctgttttttttaacattggtttagatgttgaactcctgaagcatgttgcattattttaagtaacaattgttgaaacatttacctagtcaagtaccaatgatataacatatagattgtgctggatctgttctttcagtttgttacatcttccgatcttcctgtataatagctccacacatcttcctttaaagctgtattcaatatatgacggtaatagagattgcaacaactattaatgtctatatttctaatattgtctttaaaacagtaaaatgataagttattttgttaatgtggcatcaacaaaattataatttcagcatgagatacgcttgtcatgagctatgtaacatttaatgaaacattctgagcagaatattcgaaaggaaattatttgccgatagcttcatatgcttctttacatatacatctgttttgaaattttgcgtcatttctctcacatattgcacttgcatcatttctccctcacatattgcccttcaactatttttcaggaagcatctggaaatgctcaagcttttactacaacagcagctaactttgtgatgccagtactccctggtcaaaatttcgtttcatcttcagtagcaccagtagccccatcccttggcatggtgcctttgagtaataatcagggtccacctccattcactcaaccagttgctcaactgagtctctcagatccactgcaaggctctccagctagggaagagggtgaagttcctgagtcagagttagatcctgacacaaggagaagacttcttatattacaacatggtcaagacaccagagatcctacacctcctcttccagcagtacctcctgttcaagtcccagttcctccagttcaacctcatggaaattggtttcctgtagaggatggcatgaatccaaataatctaaacaggggttctgcagggttccctttggaatctgaaactatgcactatgataaaaagcaactacctcacccattctttcatggtggggaaaaccctatatcctctgatagatttagttatcagaaccagaggtatccctcccaggtaggcgattcaacttttgtagtctctgcaattgctatcaagacatttctataccactctgtaacaaacattttcttgactcagctaccgcatagtgaagatcatcgcgttcttcagaaccatgcaccgtcaagatacagatccttccctggtattcttactatttccatttggaattctgatgttgatcttttagggtggtcctgagaattaggcagagacgtcgtgcatttgttgataaacaaggtcctattttttgcgaaaaggagtttcttaggttcagccaccaacagacaaaaatgagaactcttcaaaacattaaaagacaatgaagttaaggtttagggctgtaattttgtttctagcacttggcattctggcttgctatactatctgtatgaccatatgagtttgttgtgctttactgcctgtgatgtagtaagttaactttgtttgttttagattatatatgctgttgactatgattttacaaactcaagtataggtgcactcattaattcattatggcttgtacactttctcacttaaacgagttctcaaatattttgcctagataattgttatgtaaagtgtaacttaatttccatagtggaaattgcaatcgaattccgtaagaacgttaaaaagcttttgttctttgcaaagttgagtatagcataaaaactttactatgcttaactgtatctccatcctgaaggagaggagctagcaactcggcatgtttcttcaagtcagagaaacaaccagatagtaccaggacaacactttgctcggcatgcagggagctctgctggcatactagaggagattgctatgaagtgtggttctaaggtagttttgaacattcaggtcgcaccatacaatccagtttataatcattgacacttttcattgtttttaggtggagtacaggtcagcactatgtgatactgcggatttacagttctcaatcgaggtagattggaacttctattcaatgtttattattggtatctctgcagtaaatttagttccaaaaaatcagagctcctctcctggacttgttgaaaattgtaagcttaccttatttatatccctttcttatgtctattacctctttcaggtttggattgttggagaaaaagtaggcgaaggcattggcaggacaaggaaagaagcacagtgtcaagctgcagaaatctcattaagaaatttagctagtaagtttgtttttcctgcttagtctacagcctattagtttccttactgcacatataacataatgttttgtgccatcaatcttgtcgcaaccaagacattcgttttaaataaaagattgacatgtttacttggggcatagggtgtgttttttcaaaatttgggcacatagcgcatttcagctattgccacttaatagtgctggattattctgtttacatatgtttcattgaagaatacttaatcaggttatcataaatcagagcctgttgacaatatacggaggttcgagtagattcatgaagcttactgtgtagaatgctggaattttcatggcattcaaatttgcctgcttgcatgttgtcagttttccttttggtttctgggatgaaaacatctggatgaagctatatttctgtaattgataggttgaaaaaagcaaaacattgtaactcttttattgttttgcgtctttttggaacttcttgttttatacaatattttgtattgatttgccatgccaacaatacttgcagataaatatctgtcatctgatccaaataagatgactgatatgaaagaaaatggttttggtagcaatacaaacatttttggataccctggaaatagtagggacgatgtgttaccaattgcaagtacttcagaagaaactcgctttgtgaagatgggggagaacaattccagaaaagcaggaggttctattgctgctctcaaggaacttgtaagtatcttagattgttggttgtttgacacagctctttttcaattaataacatagttgaaaatgtgttgcagtgcacagctgagggatataacttagtttttcaagctcggacatctcctgatagttcagtaggcaaagaagcttatgctgaggtcagttagcaactatttcctcattattttacttaaacaagttgttataatgctggggagaatgtctaggatcatgcctttttctcagtatatgtgtatggtgcacaacgatgtattagcagtattgttgtgggacctgcagcatcataattgtgtcgctaactttggctttcaggtagaagtttgtgggcaaattctaggcaacggagtgggaataacatgggaagatgctaagcttcaggttataagcagccctcgtacttaagcaactgttttcctttgttgctttagtgtttcctacttatggaagaataagatcatgaagtgtgttcaaagatatttctattttgccttttgactgactgaccgatgtggaagtcaggagggttttgttcgtcttttcagtttacgtaataacttgagttatgtttcacattcaattcttgttccactaaaccatttctagcttttggaaatggagccaattaataatgtggttctgactttggagtacatattttttgtgtgtctgaggtgtggggaataaaggttgtaagtgggatttttttttcttgtttttacgtgcaagggactacttataaaggataaacatgttgtatatctgaattgatgtttgtatgtttgatcactctgtaggctgctgatgaagctcttggaatgttgagatccatgcttggtccacttgctcagaaacggtccagttctccaaggtgattgttactggctttgtgcatgcaataaatttgataattattggctatctatatggttagctttgttttccatggacatgatggaatatccttttcagcccagatattacagcattgctaattacaagttttatggtagtgtcagttaatttccttataggtgctctatcattgtatccatgtgcccaattcacgacatgtttggtttatgcccccaatgagccaatcaaaattctgcgtgtattttagcctagcagatgccacaaccacaatatttggtaaaaagaaagatcttgtgtgagcagccaaaatcttgcatcttgtgtggaccgtttgattgatgcaatttgtagttgaatccccatttctgctaggtaaatggaaaatacaaattgagtttgataatattgtctgccaatccatgaccttgatggtaacccgggttaatatggatgcctagaggaagtggaggaaaaaattatggtggctggcttaagcttgtaatttaaaattagcgtgacatgtgcaggggtgtgacttttgcaatactcacagatattctcctgttgtcagattgtagtttgtttcttcctttgtttgtttagcctatcctttgtgtcttctgttttagtataatttagatatatgtttattatttcctcaggtcactggcacccagttttgataagcgcttcaagccagattttccacgggcagtgcaaagggttccttatggtagatattcccgaattgaaggccatgttccttgacattttaacggatacattggttctaaactctggattttttagctagatgagacgtatcaactttgcagagaataaaaaccatgacacccggtcatcttgcgcggcttctactggaaacatggatggttgtggatgcaccaagaaattgcaagcaattgtggtggccatgtcttcatgctgatacttgctttgggtctgatctcacgttaattgacatgtttgacttgaagtgtgcccatccttgtggatacccagacgtaccgcttccgtgggggcttgtgcagcttctgtcctgcttgggggaacttcaatccgtggctgcagaggcgctgcgaccgttttaacattttgtttgtaggataagtttgtagcttaggtttggagtaggtagctaattttgttgcggtggaagtaggtattaatcctacattaaatcccgtgtttatttttttaggtcaatactgacaaaagttcagtagctagatgtttattatttgtttctttatgtagtcattctttattatgttcttgtcattatttgtaaagatctacggtttgttgattgtgttgccggtgtaacctcgcatcgcggggtggcctctcgaatctctcgtatgttgtctcctgctgaaaaactgtacacgtctgctgtggtcgtgactacgaagttcttccagatgactcccacctcctgaatttcccattatcttttacttcctccgttttttttaatcgatgacggctattagcttttgaacacatattgatcattggtgtattcaaaaattttatgaaaatatatttaaaaattttatggaaatgtataaaatatgaataatacataaaggactttaaatgataaaacaactcacaacacaataaattataattacgtaatttttttaataagacattgttaaatgtgtgataaaaaatgaacaacattatgtagtacgcaattagtgcaaatataaaaaaagataagtcatacttaaaatacttttgataataaaataagtcacaaacaaaataaataataattctataatctttcaaataaaacgaatggttaaacattaaaaaaacaaaactcaaaacaacaagtattttaagatgaagggaatattaaaaagataggtagtatatttttctctcttttttttcattgttaagcattgtgctaccgctctggtggaggcttgtcccttcagctctggcaaggtatgcctatacgggctgtttgcttataccaaaatcataatatcctggcccaattaggatgaatcctgtgtggcctataagagtcgtgtgcatatgtttagtaagagtataaccaatttataaggacttatcctttcaactatatcactcccaaattaacccttttacgtgaagtgatgatgaaaatgtaagtggggtggtatgtgtaagtgggctcgcccgttggttgggttgggctgcgcagttttggagggtggactgttataaatggtatcagagatgaccctcgcagttgcatgtacgggtcagtgtacaggcatgtggcctaacgtaggatcggatagatataatatattctaatattaatactaataatatatctagaaattatgcctagatttatagcaccaggatatgtctaatacaattgtagttgctatattttgggacaattgtaggttgctatgttttgagatggatggaatagtaatttcaaaaattcactcttgaaaactatatcaaaattttgttagactttagcaaagagtatctaacgcttctagaatttagtagtgataacaaagtgaacatgtcctaaaaacaaacgttcattaataccaccctaacaaattttgatagtgttcctacttcctagcacacactttttctgaaaacttctatctaaactttcatctgaaaaacttcctttcaaaaaactttcatcaaataacttttatatgaaaaaaatgtgcactgataatgcatgtgcgccaaatagcaatcatggcatttatccttttcgaaccaaatgtattagaccacgtgttaaccataggcgcttaccggcccaattataataggccgcacataccacactttggtaaaagtaaggtttagcttaattgcaagagcaaaacacccctcttggcgatgcgtccccaccaagtactcgtcgttgctagctacgcgatcacactgtgctcgagcccgtccaattcacgtgtgacaaccaaataaagttaatttagtatacatctcacggaatcacatgttttttatcaccatcaaaaacactacttacaagtcaccgcgaaccgcgcaaggttttgagaagcaacaaattgcacgcagcttgcaaatcaagcacgtattagctacgtgctgctctacctcagaaccttgcggtagtagcaatagtcacccactgaggcagaatgcacgtgactgaggcagaatgcacggcagtagcaatagtcacccacacccactgctatagaacacctaataggggacgcccctatataggccatttcccgtccacctgatatcttaggaaaggttaaaaataaaaaccggagactataaatgccagcacatataaggttgtcacgttatatgtaccgattttcataaaaacaacgagttaggttgccacgttataaggcactatgggtgccacgttatctaggggtgccaattctttttttgaaaaaaactaacacatcagaccgccgaaccaagctgcctcagtccattcgtggattcgcccttatttatcttttcccagcccatctcctcattttgtctcacttatcttttttcctagctgagccacaatccatcctccgccatcaccttctcgttcttctccccctccttcgaactcaagaaacgctcgccggcatggcggcacgcccttcccttggcgggtagcgttgtctcacggcggcgcccttccctcggtcctgcctccccacgagctcgggtgccacgagcttgagggtagccaaatccggctgccatggcccatgagcaacggcggcggtggtccatatggctaacaactacctcttccccattcccacctaaaaaaaattgagattacgtcgcccttcccttggccctgcctccccatgtgctcgggtgtggaacggccagatcccgccaccgcgagcttgggggccgccagatccagccgccacaagtaacggcaacaacggttcacatagcgcatgtacttcttccccatcctcacctaaaaaaaccctcctcccgggtctctcccaccacccttagatttaactatggtatttctagatctgagtgatggtggtgagcggcaacagcatcctcggcctccgatgggtggtggtggcctccaatgggcggcggtgaccttggtctctgatgggacgagaccttggagccatgtattaatttgtgatttagggttggtttggtttgtggcctaaatatgccttaccaaattttgtcaatgccaaattttggtaagttttggcatgactaattttggtaagacaaatttgtgtttgaattgaagacaaaatagtctaagttcactattgaaatggcctattttcttaggcataccaaaatttggcctcaaaccaaatagacactaaacactattgaaattgctaaatattggtaattctaatttaggcttcaaaccaaaccagcccttagttttttatgaatgttaagcgtgtaattttttagattagtcgtgattcattgtcattggatttgtgataccgctaatatgatgacatttggaaaatctagcacctataacctatgtgatattctcaaccagcacacatctagtgttcggtagtagtggtcgttgcggtccccgtcggccacctcaccttcggcgagagagccggcgagacgaccatcacgcctgggctaccgacggtgtccgccgccgcagcgtcgtgggtgtggccgtcaccgacgaagcccgggcagagcatctccagctcttccaagcacaccggccgcgacagcagcttcaccacctgccgcatcgtcggccggctgcacggcttcgcctgcgtgcaggccagcgccaccttgatgaacttgagcgcctcctcctccgggtaacctcccttcatgctcggatccaccatgtccagcaggctgccctgttcgtgcagcatccacgcctgcaacaacaaaacatgatcgatgctgttcttcatcagcagcgtagacatggtggcagaaattatcagggttcaggacctgacctgccgcacgagaaacatgcctgatcgaatggtctgcgacatcctccttccactgatgatctcaagaatgagcactccgaagctgtagacatctgccttcttcgtcagctgtccgtgcacgacgtattcaggtgccatgtagccactgcatgcagagaataaggtttatttcgattatgttgcatgcagctcgatcattgctgaagcctgaaagaacagcttacgttgtcccaatcacacgtgtgctaacatgactaacattgtccgggaacagcttggcaattccaaagtctccgatttttgggatgtagtttctgtcaaggagaacgttgctagccttgatgtctctgtgcacaatgcttggctcgtgctcttcgtgaagatagctcagtcccttggccactcccatacagatgtccgatcttgtgctccagctgaggtcagttactccagcagctgaacctaaatgttgcaggagatttgtaagtacgtcgttgctctagatagagcataattgtggaaatttaatggagatctcttaccctgcaatgcattgtcaaggctgttgttctcgacgtactcgtaaatcaggatcctgttttgcctctgaacacagcagcccagcaacctgacaaggtttgcgtgcttagcttcagtaatgctctcgatttcggtcaggaattcgttgatcccttgttcagattcagcagacagaacctttgcagcaaatgcagtaccatcttcaaaagttccctgtgtcatgggacagagattagtttctgtttccatcctggcttttcggctgctgatttactccatttcttcctactcttcgtgcagcagttcagatttttcagttaaaacgaacaaaatatcaagtgtaaaatacgtagtagtatcttggctaccttgtacacagttccaaatccacctcggcctatcttgttgccatcgtcgaagttgtttgttgctgctctgatctctctataggagaatagctggacatttttcaagttcagaagctctgttcagaaaacaatacaaagaaacaacgtcaccatttggagttttggacaaaccgcatgagttcaaacaagctctccagaactcatgcatcacgaaaacgtccgcaaacaattagataatcatctaaaaatcgccagcgatgcatgactagaaaagaatttatactacaaactcccaagtcctaactgctaggaacttgacatggctagcatgaaagaaacaaattgtcaaattgttactacctttgatatcttcttgggatccacagaagcatctcttcatcagagccatctttcaagctggagctgtgacctggattcctggagcaatcctctctttctcaggccaaacgggagctccaaaagaaaggccaagaatttgttgaagtgagaggaacagggtttccaagcgagcattaaatcttcagaggtgttggcccaagaagagagctctattacagcaagcaacaaggtgaagcaatgaagcagggaggtgcttggaaagtgccaaacaaactcttcactaaggtttaattagggttcattgatggtgtactgtacaaaaatacagttcatcagtccatgcgtcccgatggatctttgacccctccctgtcaacgagccacaacggccacttgttttagcttaaggggtcaggtcaaattccaagctgttgcctctagatgacgtgacagtaacactcctaaaaagcctaaagattacgttaccaatctataagtgtctgcttggctaatccaaaactgatattcagttttttttcttaggattaatatttatgttttcatgatcggaaaaaaataaaatatgtatttcgaacatccttgaaaataaaacataaaatttaaaaccgttttttttagaattacacagtacaacgcagacactcacaacgcacgcgcactcaccctacccctatgagcattttcgaagactggccgacaaattttggagagattgaggaagtcaccacaggcgcctcgctgtcgacgggtacgtcgcctaccactgaaagcacaacgccgttaaatcctggaaagtccgctcccaggggagtcgaacccaggacctcaggtgccactgaggctcttgtaaccattaggctacaggccctttcactcccatatgaagaaaaaaacagaatgtatgaatagtagcgtattgtttatatatgaatttattttttttcttctcaacatctaggttgaatttttggatagatattactatactatacattatcagtttatttaaaaaaattacaagtatttgtatcaaatttagaaagaaaaaaaaagatatatgagaagacatcccctcagggactagaatactctccaactaaaacagcgagagcacaagatgttgccaatgtttcgaaaacattttaccggttgttactggctagatttaagccatatgttattttcgcaagaggtatattacaagatatttctagataaggcataactaagatataaaattgcacaccacaaaccaatttcagcacctttcggatcaaattgattcaaatgccaacaagcacgtaccatcgatgcaggtcttgtcacgagaacgacaccctcgtctagtagtgagtggtgactagtcatttttctaggatgttaatcgattagattgaggttatgtcatttcaaaagatcatgtacaatcaaaaagagaaaaatagagtagagataagggccaagaggtgctaaaggtgatgtctcctaaaatctggtgtaactctcttcgaccaaggggtagctagatgggtgcacctgcctcgctgtcgacgggtacgtcgcctaccactgaaagcacaacgccgttaaatcctggaaaatccgctcccatgggaagtcgaacccaggacctcaggtgccactgaggctcttgtaaccattaggctacaggccctttcactcccatatgaagaaaaaaacagaatgtatgaatagtagcatattgtttatatatgaatttatttttttttcttctcaacatctaggttgaatttttggatagatatcactatactatacattatcagtttatttaaaaaaattacaagtatttgtatcaaatttagaaagaaaaaaaaaagatatatgagaagacatcccctcagggactagaatactctccaactaaaacagcgagagcacaagatgttgccaatgtttcgaaaacattttaccggttgttactggctagatttaagccatatgttatttttgcaagaggtatattacaagatatttctagataaggcataactaagatataaaattgcacaccacaaaccaatttcagcacctttcggatcaaattgattcaaatgccaacaagcacgtaccatcgatgcaggtcttgtcacgagaacgacaccctcgtctagtagtgagtggtgactagtcatttttctaggatgttaatcgattagattgaggttatgtcatttcaaaagatcatgtacaatcaaaaagagaaaaatagagtagagataagggccaagaggtgctaaaggtgatgtctcctaaaatctggtgtaactctcttcgaccaaggggtggctagatgggtgcacctgcctcgcgccatcaggcaacctctgccacttctctcagcatcttgcttataacattgaagacctgattgtttcgctttttctaaattgcccacgcaactagctaagatgtcaatcatgtcgtagtcattttgttgtgtcgtgtcaattagtttcctgctttctctcccaaccaatgaataaaagaagatgcattagaggggaagcaagagggtttgttgatgccgttcaagaccatccaccatagttgcagtatttataggcaatggcgccaaaggatatgagcaattgattcctcttgtttgtgtcatagaagacacacttttcggagtgaggtaggttatggcaatgcagcctgtctccggtccagcattggttgtgagcgacaagccaaaagaaatacttacctattgttaatccgataataaaaaatttaccctgttttaaaatataagtatttttttcaagactaactcatttataagataatgtggaagcattcaatttagtccgacacaactgtaccaaaagcatgttttgtcttccattttcatataggatgaattggaaccataccattgcaaatataccgatttagataaatgtcattataactcatctattcgtatctataacattcgaattcgcacaaaataagaaccatgttatcattgtcacgtttttttgtcatcatatggaccaaaatacccataaacatgggatccacatgtcagtttcgtgtttagtttataccctcacatagtatatctcatacgtttgggaattggcttgtaggtattaataaaaagatcaaggatcttattcttgttggagcctccgctgcatgttgggctctctagtttagtagaaatgaaatggtttttgatagaccaccttcaaaatcttatttgcaggttcttttcagggtaacatattggctccgggaatgagctcaaacaaagacatgatgattatataagcaaataaaagatgcgtaatgtaaacttgagtcgactatcatgcagctatttgccaacttcgagtggagattcaccaatagaattcagtagttgcggggtctttacctagtttggtttttattagtttatttctacttttggttttattactttggctacatactcgctgtgtgagtctgcttttatgtgaacattgtaataattggttgtagctcttgagtaaaggccaggatgtttcattccattatctaaaaattatctctcttatttcttccctgggcgacagttgtgctgctcgtcagcgtgctccgcgagaaccgcggacccgaccaccacgctcttggctgtgtcgacgggatccttggcgaacctccagttgtggtcggagagcttggtgagctcggcgaccatcgctgcatccgctgattgtatctccttggcgtcgtaggggtgttgcgcctgttgcagctatacgtacgctgccttgactgccaacacaccagcgaagacgctcaccacgaacgcgtgcgcggtggcggcggcgcgaccatcttctccaccgccggagacacagctggttgcgccgcaccgcccttcttctacatcgctcactcctgaacagcttgagcgtcgccagcgagttgatgaagctgtcgagcgattacttgtcgtactcgctgccgccggagatagagcccgccatggagcgctttcggcggagcaacctcgccagcctccgccccagtccggcgtccttctcgccgcgtgactcagcctcgacgcgcagttgtcccacttaagtcctctgcctccgctcaaatcttccgactccccgccggcggatccgcctctctctgtcggcacgtgcctgaatcggatcggcatatttctaatgacatggatcaaattaaccttttcatataagaaccagttagacatttttacggtggtttctagttcaatctatgcctttttttttcatccaatagattatatctgtttatactgtaatctcaactatttttagtagaattttctactggtggtagagtttaggttgttcctacacgtaataattctagtggaattccactactatggaaagtactcataagagtaatatttatggtcatagtcttatgattttctgaggctctatatgggacgctggattgggcctacaactttactgattggattaggcacaatccaatttagcagtttggtggtcacccaaatataatcgtgaatgaaacaaaatccagttgggccaaaaactgatccatgcaaaagttgcatgggcttccccaacagagagcaaatccaatgccctcgtggaaattagattgatgtatcatccctcctgtcagttgactgaagggagagatctcagtcatgtattagcacttgttacatttgactagccaaactgtgaaagcaaaggcaactaggcaagcacgatggtctttgagataattcgttggagtttcaaccttcaaccactctgttgtgggcttgtggcaaacatactactagtaccaatacttgttcaatttgtctttcgctatagcaagcagccaagcaggtggatgcaagaaaagccgcacatggttggactcagtcacctgatcagctgtgcaagaaaaggcacacatgcatggttggactatttacctgatcagctgccacggcggacgcgatggcgaattcagagaaagatgcgtcctgtccccgtacgacgcagtagcgtccaaatctcaaaatatcaaaatatttctcatacagattcacagatccaattcttttcagaacgcggacactggggcacagcccgtgaacaagctgttcaggagacgcaaagtatgagtataatctagtcatatagccccgtggttttaattagaagaagaacacgtcgacctgccgtgccaaaaacacagctattatacgagttaaaaaaaagaaaaacacagctgttgtcgcgtcgacgcgccgtacctatcgagacggacgatggcagatcacattgcggcggttggggccgtatcgctacgcgacgaggagatgatgcacggcgccgcaagatgccgccgaatagcgcggctcggctcgcttatctatcagtctatcactttccatggaacttcctggtcgtagatcaggcgtcctacctcccattctgtacagatgcagatgggtggggtagctgtgaaaactgttactccacagtagtacacatgcaacagcgttccaaacatcgctgcaaaatctacagctcacggcatactactacatccgcgcacctgctttgctcgtcgacgattataaatacccttcactagttcgctgaaatatagacacttccacccatttgcaccgccatttcgaccggccggggcagtagtgtactacgtatactgtatacagttcccgatcgacgcgtgcatggcggcgagccttctgtcccacgtcgtgtccgatctctgcatcggcaagccgccggcgcgcgtgctgccgccgtccactcccgtcgcggccgccctcgccgcgctccgcaccggagatgaccccttcgtcttcgtcgtcgacgctgatgaggcgctccgccactcccgcgggaagaagatcgccgcggggtgcgtcgtcgtcaaggttagcgtcgcggacgtgctctgctacgtgtgcggcgacgcggacaacctcagcgaccccgcggccgcgctcggccggcccgtgtccgcgctcgcggcggccgtgcacgctggtggtggcgatcatcacggcgccgccctccgcgtcgactcgctcacaaggtacgcacgtgacagccggcgccgccgctgttaattccgctgttgattcatcagccgtggaatgccacgacgcaaaccgggaatcgaattgaactgtgtgtgatctggtccaactttgcagcctgctcgacgccattgacgcgctgctgagcaacgacgctcagaccctgctcgtcccgctccacgcgcacgccgcccgcagcaggaagcaccaccacgtacacgtctccggctgctccccggccaaccccgccgccgccactgactactgcgtgctgacgcgggaagacatcgtccgccacctcttcagctactccatctccctgttcgcccccgtcgcggcgcgcaccgtcgcctccctcggcctcgtccgccgggacgtgcacgccgtgcacgcagacgacgacgcgctcgacgccatcccgctcctgcggagatccatcgcggacggcaccgccgtggccgtcgtcgccgatgacgacgccctggtcggcgagatctgccccggagttctcggctcgtgcgacatcgagtcggcgtccgcggccttcgccgcgctctccgccggcgacgtcatgacgtacatagactgctcgttgtctccgccggagttcttgcttcgctccatcagggcgcagctcaagggcaggggcatggacgccatggccgacctcatggacgccgcggacgacgctgcctcgtctctgccgttatccccatcgtcttcctcgtcggcatcgtccgacgaggactcaccttttgggcgtgcgcggcgcgcaaggaggtcgtcgtcgggaagcttcaggtggaggtcgacgaaggacgtcgccgcatgccatgctgggagctcgctggtggcagtcatggcgcaggctcttgcgcaccgagtcgggtacgtctgggtcgtcgacgaggtcagcggcgcgctaaccggagtcgtgagcttcggagatgtacttgcggtgctccgggagcatctccgtgatggtgatacgcagatgaactgacgaattagcagttcatttgcagttttgcacatgtgcaagtgtaaattacacgagacatgagataaatttggcccatgagccacggacttccttttctcgagtccagcccgtaaaagagcatttaggcccaaacctaacaagaacttgcagttctgctaccaacaaggtttgacacatcgaaatcagtctagaggccgcaactttggcccagcagactgccagacttactcaggatgggaatggttaggatatggatctaacctaaaccgttttaagtaagtttattgatccatgatttaatagggtcaatccatcaagaatatgttatatcaatagattatctatggatatccaaatggttcaactatattattggtagacaaaaaaactcgtattacatgtatggaaaactcaggcctgaaatttttaaactcacattcacattataaaaacttatcaaattttattaaattttgtagagatgatttattatatggagaagcaacttcgttcaaattttaagccatttagacatgcgtggcccacgatgcattactaagatccaaaaattatagttacatgtgtgtaaaactcggtctcaaaatttttaaactcgccttcacactctaaaaaattgttaaattttgaattttgtaggaatgatttattatatagagaagcaacttagtacaaattgaaacatttatatatataaagtcattttgggtcgaaccccttaaacctatgttctaatggtttgagtcgtttggtcaatttatatttttagagcaaccttaaaaattcattaggataaatttacgaaaggtttagtgggtaaatggatctaccctagcttttagcccaaaaattcctagtgacaggctcgttaccaggcttgggccgtgggccatttttttcttattgtggtgcgcaagttcttcgtatcctataaatcatcttttgtagagtcccttttgtatccaaaagtgtatgcatatgatatgagccacgaaagcgaaaccctttctgcacagaaaccctttgagaggaaagcccggccagtcaatttgcggctttgcgttcgatccggcctccctgccacaccgcatccggcacgcctcataacacggaacgcgcgcgtaaagccgctgttcccgtccgtcaccgccgctctttcccgcctacaaaaggcacgaacccccaactagcccctgtctctcgtctttgacctctagccgcatcccgcatgggatgcctgcacggcccgacaataagctactccaggattcacaccggaggcgccgccgcgctttcggttaagcacgaagaacaaatgcgcagaaccacccagatccctccacattgtcaccggctcatgcgcctctcgttctcacaagcggtgagaaaacgagaaaataaacgcgatctgctcgaacggcccgtaactgtacttgtagtacattattcttttcactttcttttttgagatggtattagtatgcactactcgtacgtacattattcggtttcacgtggagtcaggcgatcgtcgattcgatcgagcttaacagcccggaaagagagaaaggagaagaacgtagtggagcatatcgagtacgtacagtaagttgggcccgtggttccgtactcggcagcgtctgctctaagcaatctacagtggattagcggttggtaggctcgtgtttagcttaattaacacactttgcgagtttaactgtttaagcagggagctgtgtgcatagcggagtagccagtccagcaggaatgccacccaaaatttacgcctccctctgaactctgcaaccatggattaataatccatgcagaggaaatggtggcaattcgtggagctctgagatgagctcttaatgatgtggaccatggaaggaatggaccttcgctgtgctggcttgggacctttctggttcactaactcttgaaactctgacagcaggttaccagtaacctgtgtaactgtgattctgtgaatagtttaggtaggttagcgtagtactacagtacttttaacgtttttgttctgattgaatgaaccgcgctcgggtccaagaaaaatttatagccctggtcccactgaacacgtggtgcttcattgagattactcagattacagatcacaatagtgagagatcctgtccgtttgtgccacacccaaggtaacaacagccccatgacaataaacctgtgtttggcgacgctcaaacgtaatcgaaatcaaagcagtgttaacttagctcacctaacgcatgcatggctcaccaaacgaatactataacaggaaattctgcagaggaaatcgatcgaccatattgacccatggtgatcgcacgaatcttatcctctaaagccaacaaaaatgcaggcaatatacaaattaaagtagcccggccggaagatcaatcactgatgaaaaattggagaaaggaaccaaacatggactgtcagatcacagtgtagtggcaatataaactgtgcggactgagactgactccaacaagtagccagccaattacaactgggtttacaagcaagaagcaacagaccgataattaacggacgcaaaatgtactttcggtctttcacccaactacctcccggcctccttccccatgtacgtacgtactcctacgaagccggtgccgcaaaaccgcaacggtcaatccatccggcgaagcgagatcgatcgatacggccgccgccgctccgctcgatcgatccgcatcacgcaacggacacacgcacacggtgtcgtacgtacgtgtactctcgtgggcgcggccggatcggagcgtgccgcgcgcgcgcacatggcgagaggccggggccggggatgatacagcgcggcttctggcggccgtgtccggcgttccgggccttccggcttcgatcggcacgtacaacattaaaccgtggcatccgtgttcttccgcgcccccaccatcttcacggcgcgcagctttggtgccgtccttgatcatcattacctttgctgagacaagaagatcaccgaggaagtagatcaacccgctggcgtgtttacggccggggaggtccatatatatgtgggttatttaatttttaagggtgttcatttggagttcaaggtgactgggagctgcaaccggtttgcatttttgtggagttcacacatgcaaactctattttgttaggactgatgttaaggcgtatgatacaaattatcaaggacaacaatgtgaataaatataatttgacaaatcgaacaatatttgttgctcagacaggaagaaaaaaattgtaatttaacaaaatacaaagccaaataaaaagtaagatttggaggaagagacgtctcaccaaacatgttttaagaataaattatgagcgtgttgggaattaaatataggactttagagttaaaaccacaaatctcttaccactgcaatatcaaataggtctactatataccacagttataatcgagcgtgcaaagttactcataagaaaaaagaaacatatatcaacagtgggattaattatgggagtagctatatttatggcaccatatttttcaccaaaaaatagtcagcatgtatttacattataagtcactaaattacatatgtaattatagtgtaagtgctatgtaagtacagtgtaagtgaataaattacacatgtaattatagtgtaagtgccgtgtaagtgaatgtaagtaagtggtaattagtatataagtactttaaaattcattattaattttttttggcaataaagtgaatagcaatactgtgctcggttggttaggagctgtctgcgactttgaaggtctgggtttgattctccgtcacggcgccttatgattttcttttgcactagcacgaatctcgatgtaaatcgtactgtcacaaaatcgactattttttgataaaaaaactggcgacatatttttaacaaatctgttaattatcgtggacgaccataaacaagcccccccatcaatcatgtggcaaaagtcaagctcgccccattatagcaccaaccgagaaaacgggcggctggggttacccatgttgatcgattaagcactagtcctccatatatgcgtgtacaaaaactgcatgccaccaccaacttttttctaccgttgtccacacattataaatccagtcaccaccctagtgtactctgcaggcccgtgcatcccccattcccctgtgtcccgttcgtgccatttgtgcagcgagctagcgtccatcctgagctctcagagcttcggggactggggcttctcgaaggcttaaaagcgacccacgcacagggggagtgagaggagtgagagtgagctgctcctgcacaaacaagacggcagtagcgacaggatagctgcttcgatcagctagctcttcgctatggcagccttctcctcgagctcgtctgctcccatgttgatacgctccgtgctcttcgtgtctctcctgtccgccgcgttcgtcttcgactccggcgaggctggtgcggcgcacagggtggtcgacccggagtggcacccggccacggccacctggtacggcagcgctgacggcgacggcagcgacggtgagctctagctcctaccacttaattaaaccctgcagctgctacgacatcattaacctgattcctttaccttccaagagagtagataagcttaattaatttacgttcgcgaaaattaagcttcaagtcttcaacaatggcggccttcggtcccctgtgcagaatgcacgcattgcgcgctgcgactgacgcatcaggccaggttttcgttcttttctcctttgatgattattccagatcacacttggtattaaccgtcagattcgcatcctatagctgcagtgtttctagcttcctaagaaaatggcgtacttctagccgttggcacatttttggtgcctctcctctcggtagttggcccggaatttcggcgggcctacgtgcattcccgcactagtgtcacgctaggacgggcgcgtccggagcctttaagattcgtgcatgtttgtgattgtgaaagattataaatttataatggccggcacacgagcgtggagcctagctagggcgtgcccctgtgtcgggtcctttagctttgccgcatttacgagtagctaggaacgtaccaacacgggaaactgaggaaaacccagccgctttaatccaccgacactcccggtatattttgcgccggacacaagcaaacaagtgagtgggcatacggccggagaaattaactgctgacaaaatttccaccgtttgttatcatgggcgaactgcataaagtgcacacacctgagacctgacaatgctgaacttacgttaggtttgttctctgttaccacacttaacgcaataacgcatattcacaaagttcctgatgtcttcctgtccgttatatatacagccattcacatctcggctagctaccccccccccccccccaccccaacaaatgatcgcgttgccccgtggccactggccagtataaatttttaccagatctgagtcacccagtgcccaccatgaggccacgatggatgtttccatgtgtaagctttcccttcccgttttctagtatctggcacactacggcccaaattaacgaactgttcattgcgtgtccatgcaagcatcaagcatgcatgcatgtcttcttccttgactgtccatgggcctggtcggcagtaaacttctatacaaccatcgtccaaaaatgtagtaacttagattagaccaattttaaattacgaatctcatttttagatgacgggtaatcacgtgagcatttctaatttcagagttgtaacctgtttggctgtatgtatgtacgttttttttttttgcaggcggcgcgtgtggatacgggacgctggtggacgtggtgccgatgaagacgcgggtgggcgcggtgagccccgtgctgttcaagggcggcgaggggtgcggcgcctgctacaaggtgcgttgcctcgacgccagcatctgctcgcgccgcgccgtcacggtcatcgtcaccgacgagtgccccggcggcgtctgcgccttcggccgcacgcacttcgacctcagcggcgccgccttcgccaggctcgccgtcgccggccacggcggccagctgcagaaccgaggcgagatctcggtggtgtaccgcaggtgagcacctaacagtacatttactcagcttattatactacagtattgcatagcctggggggcagaggcagatcgtgcacggcgtacgtcgtggtggtccgtatgttgttgttggcatgcctgacgtttactgagagaacgcagccacttggaactgaaaagaaagccagttggaactctgccaaaaagtacgtatcctgcaggctgcagctggtactaccgctgtattttttccctgcccggcaattgtacagcatgcttaattaattagagtaggcacgaaggttaaaaatgtcgaggcataaattaatgaggaggaagacactgtcagatctgaagtacagagaggaccatggtccatggtgaacatatgcctctgcgtctgcgctcgcagtagttggactgttggagtgttggatcttggaggcgccatgcgatgcaagactcctctcgtcacgacctcccggtgtggacgtgtggtcatccatgccttctctccattcacagattcactgcatgctagtctggataccgtgaagaaattaaagaggccggccgggcagggcacaccatggaaaacgcaatgctagatggagtagctggtagctgcagagttcacgcttgtcatattcatatcgtgcgaggaaacagtttttacggttttactactaacgatagctgcatgctcacgagtttgtcgtcgtttttcaggacggcgtgcaagtacggggggaagaacattgccttccacgtgaacgagggctcgacgaccttctggctctcgcttctcgtcgaattcgaggatggagacggcgacattggatccatgcagctaaaacaggtaaaagaaatggtccaactcgattgccgtcaatttcaggtcctggctagtaatagtactgcttctgcctttgcattcccaattgtcgctcacttgcatagttgcacgcactctactcaacttgcatagtacacttacctgatagcaggggggaaatggtgttttagatgagtaaatatattgtacagtgctctgctttcatggcatccatgcatgtgagtcagggatggatcactcttctcagttctcacatgtggttgggggacacggctgatgatttcctggacgaacaggcagcaaaggagtaggccctttgctttgttgcccccttttgtccagggcaacagatctatagttctagaatcgcatgttgaaagaactgcgccaagctaaaaagaaactactataccgattatctaatgataacttgtagtactagtacttgaatgtaaataattcagtacttgctatattttgagatggtgggagtagctccttgcagttttttcttgcacgttaaacatttctgcagccatatgttacctactacaccatttgttatactgtactagtatcacccttccaaacccctactggtttcagccaactttttccaccatgcatattgaaacatatccattaatccatctatccaccatgggtgccattctagttgacagcccaaaacaagtgccctgcttggcccccttttaggcttcttggctgtgttcggcatcaccttttcccaatccttctcccacattttctgcgcgcatgttttttaaactgctaaacggtgtattttttataaaaaaaattctatataaaagttgtttaaaaaatcaaattaatccattttttaaaaaaactaggaaggtggcccgcgcgcatgcgcgggcacttataatattaaaaggtaagatttttattgtttgtttaaaaattttgtctcataaattaagggaaaactaaagtttggatacttttattttgcaatattttttgtaataatttaagggttatattttttaaggtatcttgaaaatccattcacaaacttttgagtaggagatggattaagtacttacgacttttgaatcatgttttctttctcgagtaaataataaattattgcttgtagtatggttacaaatgaaaaatacgggagcaagatactcaaaatttttgtgattaaatcatctcatgaagacgcatgacataataagaaagggagggaagcatatacatggagaaaaaaataaagggaaaaatgaaaatgtggaggagaagcgtaggtacccacgtacgtaggtgcgtaccgaaggtggagaggtgggacctcgtagtatttagtttgttataagatcaatttaatctaatggtttataatattggacccaccgatttaagtaaaaatcaagtaatacatactttgttttttttcccttagaatttctaatattttctctaatttattagagcaacacgtggtagcttaggggaattttaagaaattttaatggacttaccacatgtgattagaatattaaccatgtaatatatatgtatgggatatatgttaatattcgttccagcttcgtccatgtttatatacattgctagcaagccattagaagtctaattaatactagtacatattttgacacctatttacaattgttcatagtagctcttacagattcatcttaggctcttgattatgcgttgatcaccaatttactgatcaccaagactcgcatgaaaaaaaaaatactacttagggtttaggacaactgacattgatgaattatctgatttatgtgatagccattagaagtagtacatattttgacacctatttacaattgttcatagtagctcttacaaatttatcttacaatcttgattatgcgttgatcaccaatttactgatcaccaagactcgcatgaaaaaaatatgtactacttagggtttagaacaactgaaattaatgaattatctgatttatgtgatagctatttgagattataaactaatgaattaacttctaaaaagttaaaaagttgttttaaaaagcaccatttaggaacttggaaagcgtggagcgtgcaaacaaaaatccaaaagatggagtcggaaaaaaaaatacggccttaaactcccttataacactcttttcctagtaagagttctattgatattcactaatattatgctcatatttataacataataatttctttcaactgtaagaacaaataattgaaaatccaaatacgacataacacaatacattataattattatgtaatcaactcttggtttcaggttaaatagagctaagtgctagaaaaactcaacccacggtgcttaattcttctcttattgcatcacacctttaattttatttttatgttattaacaaaattaatcatctccatatacaatttgatacgtggcaaagcggtagcactgcagcagtcgtgatcaccttagatgcctcagacacgatgctttgtcacaaagtgcgaaaggcaaaggtgcaaacgtgcattgtgcagcaagccaaaaaacgaaaactttggacactttatttattaacaatagatccgatgatgatttaaataatgggtccaccggttctagtggaaatgtaaattagttaatatagattttaaattgttaatttaatgggtgcacactataatggtgtagactttattttaaaacagtgcattatttgagaataataatacaaagtaatgagtacaccgatttaagtaaaaattatcttatattattaatttaatgggtaaacatataatggtgtaaattttagttacctgtgtttataagagttatatgatggtatattctttgtttgtaaaattatgattatttaatatatatatcaattgtataaatggaaaaaagaagaaaaaagaaaacaaatggagggagccgtacgtactacatacccacatgtacgtacgtgaccacgggggaaagatgagaggtgggacccatagtattttgtttgttttatgatcaattttatctaacggggtataatattggacccaccaatttaaatgaaaattaagggctagatgttttgcttttttattagaatttctaggaatttctctaatttattagagcgccacgtggcaacttgagagcgattgtaggaagtttaatggacttttagtatataatagatagatagatagaagattaactaatacttaattaatcacgtgctaatggaccactccgtttttcgtacggagacaataagttcccaacccacatatgagaacacagcctaattatgccgcgcttttttaacgtgatctttcctccatatgagcaccaaaggtagcatatgcactatccttttttggtccaaaaggtccgtaataaactccactatcaccactcaccggccatgctagcatctctgcttgttggatatcagacacacagtaccctaccacccttcattctaaagagcatttgttctgattttcttagtgaacacaccgctacaagaattcaaagattctactcgtagtagctgatatttggttaattacattctggggtacactgagtaatttgcaattttgccgtgggtgcaggcaaactcggcacaatggcaggacatgaagcacatctggggggccacctggagcctcaccccgggcccactggtggggcccttctcggtgaggctgacaaccctgaccaccaggcagaccctctcggcccaggatgtcatccccaagaactggacccccaaggccacctacacctctcgcctcaacttcgcctagaggaggcccctccggcccatgtttgatgtttcgttggctgggctccccaaggaggcccatacggcgtgtttactttcggatgaattgtgtcgttcttgcgttgcagattggagtaacttgttttgtgtagctatagctattgatgatacctgcctaatagtgcgtgggactggcatgtgggcccaggtagccctctccgaagcggagagagagcgtgatttggttggtgttttgcttgccttcctgggaggtttgggatcccatgtggttagaggccccggtgaaaacatcctcagggtctatatagttaagtgcatatatacttgtatgtgtgtcaagtagatgaactgtattatgttccctagctacttccctgtgcgccctgaagtttgatctttgtgtttgattatttttctcgttaccaactaatgtattaatgttggtcttaaactgatgtttgcagttatttgttctgaaactacgcatacaatcaataattggtttgccttcactttttttttttgcattatcaatcatccataacctggctctcgtgctgattttgttaagttgtgttggttgttgctatgctggtaatcttttcgcttatgcttatgcttatcagccaaaatttaaatttccaaccttaaatttagagctgattttgagattttttcatcgaagtttatttttcagcctttacttttagatcgctaagaacacgtatataaaagttttattcacaaattactttttatttgcaaatataccgtttcgcttatcgcgcgaaaaaagcgaaaggatggctccgtccaattgagtccgaggctccgagccaaggcggatgttggagcaagatagattagggaaaacttttgaatatgttctaaagatactcttaacacaaattgtaagatggtttgaacttaaactaagatatataacttttcttcaaaaattttgccagacccgcaactagcacaaaactcacattatgtgctctgatagtactccaataagctcaagtctaccaaggttttaggtagagttaacttcaaatcgtcacgatcacggattcacggacgaacggttcgccatgtgcacgctaagcgacaacctggcacgtgaatacgtgacaaagccatgtcctctccgtaggcggttaggcttggcacacggacggaccaaaacggccagcgcaagatctgacggcccacattcactccacgcccatcccgccaccgacaggtgggcccaacccccacgttagtcccgcatctttcaccgcggcaacagtctggactgcaccgcacgtgccaggtgcgtgcgtgcgtgcgtctcctccccttccctcccccctcccccgcgaccccggaatagccgaacaggaaacctcctcccatctcggcaggcggcggcggcccatcgtatcgggaaaccggagccccccagccagccaccaaatcgacaagactcgtagtcccccccctcgtgcgctccccgtcccggcattgccgccgctgtctccgaggagtggaggtagacgcgccgccgtttgtcgatcggatccttgcttttgcttgcggttgcgggcgggggtttggggtggcaatgggcgccgcggcgggggatggacgggaggaggaaggggtgatggcgacggacttcttctggtcgtacacggacgagccgcacgcgacgcggcgcagggagatcctggccaagcatccccagatcaaggagctcttcggcccggacccgctcgcctttctcaaggtggccgtaacgatctctcttctctcttgctaagtgtatctctctgtcactctctttttgtgatctgccttgttctaggtgaaattttgatgcaatgcgcgcgtcgtaaattgcttgcttgctcggacgacgtgctcctcgcgaagcttttgtgtcgtttgctgagttttttctgcgatgcgtgcggcccactttgccaatttgaattcggtgctagtttcgtttattcagagctgaatatttcatgttctctgaatctaggaacgactctttacctgcacatggttgatttatctattcgtgtatgcgccttgcgcctgtttttaatcaggcactgactacggctgaaacttttctcacttctcacaattcatccgtggatttttttttcagttccaagttagcaagttttcctgcctttacaatctgggatcccttaaaatctagctttacctcgaattattctattcgcgtggtgctatccaacaagacaaacttccatgcttgaaaacatatagttacatttccttccatggatatagaatgtctttagccatgtggttgtcagtgatgcttgccataataacctgaacttcaaatagtatatcggtgaaagagtaaatgagctcacagatctgtgattaactcaggtattctagtggcaaatttagcctccaaatttgaagataaacccttaaggtgctgatccacagaattgttaggttggtttcgtagatcctaatatttgatgctatctgagcagctcgattggcctcagaatctgcttggccttgcttgctggataaaattgctgcctcatatcactagttaccgacttgcttcctttgaaggcatacactttcccgtaggcctggacaacctaatatctcaggacttgccttgcctaaataagtaaatgtagtgtggcttccaattgcattgcagcggccagcgaggcacccaccatgtaatagtctctgtaagcttagccattattatgcaacctgccttatttgcacatacgatgcattcttggtggtggggactggaatagggactttggagctgtagtattcatcttaggttctaaactcatattagtcatgaagaagtaaggcttcctttcataaaaggggaattctttgctactctccaactagaagtatcatactaccttgacaggtgttaaggattgacctcaattcccaacatatctaatgctattaacatggtcacaaagtcccttggttaataatctttgtatcctatgtaaaactacattttgtcttatctagtatagtactcatacaattgatttcccactaactgcatttaattttatttctttcatctcaccacaagcaacctcatcacaaattaatttagccattggaccaaccattcggacggagattcacaaatagaattcaataattttgtggtcttttcttgtgttggttttcagtacttagcgtgtgtttctgtccttttaggcttttgtgttttttatgacttttttgtcatgcgtttttggtttgtttgaattggtgtaataattggttgtagctctttgagcaaaggccggcattctatcccattatctaaaaaaattaacgtccaagatttactgtgaatcatactcatgccacttcctttggttgctgtatagtaagctattaccaattgtttacagatctcctctcaaccgttcagaaagttcctatttcaattatcctattaacagttaactcaacaacaaccacaacaacaacaaaaagtatgcacatgttctgtgacaacactctggatctcattcagatttctttaaatggacccctcctgcctccacttccaaaataaatgtgttatcactaacaagcataaaagctcttaacatgtcacttgccaggatggtgctccacacaattgtcgacctatacacctataaagagagtaccattcattacacccctctctaatcttgtcccgaaaataggaagagtacttagaagtataatgtgttgctaattttgaacattcaagctccagaaatctatgcaccatggtttcatgaatttatgttgagatcagtgtgcttgagaaaccctaattgttatattatcatactgcctattctgtatgatacctgacaagttatatggatgcccagggtgtcctttcatagttcttatacctgttaggatttgaatcgtaatggtcagttgtctggttctccactctcgctaacgcaatgctttagcttcatatgcaaaagaggttccatgccctttatggcatttgccttttagttcctcactatggatgtaataccctccactgagaatttgtaatacttgtggtcttatgaaattgattggagtatgatacctttctattcagagttatctttaaaatatccatttagatgggtatcaataagaaaacatccttccatcattaattaatgcttatacgttttcgcttcgtttgtaactttgttgcagattgctgcagttgtatcacttcagctatggactgccacattactccgagatgctagttgggtgaagatactgacagttgcatatttttttggatcctttttgaaccacaatctcttccttgcaatccacgagctcagtcacaatcttgcgttcacaactccgagctacaatcgctggctaggtatatttgctaaccttcctatcggtgttcccatgtccattacattccagaagtaccacttggagcaccaccgtttccaaggtgttgatggaattgatatggatatccccagccaagcagaggcgcatgctgttaagaatactctaagcaaatctgtatgggttgtcttccagctgttcttttatgcccttagaccgctgttcctcaagccaaaacctcctggcctgtgggaattcaccaatttgattatccagattgcgcttgatgccagcatggtgtacttctttggatggaaatcactagcttatctgatactctcaacatttgttggtggtggcatgcatcctatggctggacatttcatctcagagcactacgtattcaatccagaccaggagacttattcgtattatggacctttgaatctgatgacatggcatgttggataccacaatgagcaccatgatttcccaagaattccaggaacaagactgtacaaggtaagggaaatcgcaccagagtattacaacaatctgaaatcatacaaatcttggagccaggtgatatacatgtacatcatggaccaaactgttggtcctttcagccggatgaagagaaaggcgccgaaaaaagattcatagatttatgcatttagattggtttgtttcagatgacattttctgtgcgcatatggtcatatatatggttgttagacatggtcatgtgtgcttgtatgcagtgggatacaatactcgataagtcgatatttctttgttaattgttactgattcattttgttccgtccacactagaagcagcgtttcagtgttactgtaactcatgaaactgtaaccatggcaccgaatgaaaattttgtagtatcatcaatgtatggtgtagaaaagtgctggtgttgtttacttcattgccaaaataagcctcacaattattattggtaagacaacaaaccaacaagatttactaatgcaacctcacaattgccaaacaaacggtaaggtctgttgcggaatgttgcaactggcgactccgatgtgccagtaatgttcctgaaaaaaagtttgccttagtttttgcccataccgtataagaattttatacttatttttataattcatcatttcagcattactggcatcagatttaagagcctgtgtagagaagtttctgattagctacagtttcttacagaattagaagcttttccaagcagttcaactgcagtttcttactctgaaagactgtaattgtagaatttagaaaaaaaaactaaaaagaatttagaaaaataaactaaaactataaggtagaaaaaccagttttaattatctctagttctaccctaatcaagctttggttccactacttttttgttttgcatcaaacggctcacatgagattaggggcagtttagtgcgcgcgcacgcaatagattatactggtcttaggtgatctcatccgtacaaacacacaagaatggctatgatttcaccaaatccaccgtctcaaccctattattatataaaaaagaaatccaccgtctcaaactctctccagggtatccctgatccctcttctcgtgagttcgcccgccctcgccctcgccctcgccctcgcctgggccgatccccatacatcccgcgagcgcgagcgagccgacgcgccgccgttcgtcctgctgcttccgccgcgtcgtggtgagcacatcatccgccgccgccgccgatccccatccatccttgcgagcgatcaggggcgccgtcgtgttcgtcctgctgcttccgccgcatcctggtgagcacatcctcctacgccgtcgcctgcgccgatcccccatccatcccacgagcgagcaggggcgcttcttccgctgcatccgtccgttgcgcgcatcctctttcccatctctctctacccacgcattttttttctcgaatttgcgttaaaccctagcttctgttctagaaatttgcgaaaaaccttaatacgaataacactttgattgttcccaaaaagtttggtgttaaactttaataccaataacagtttgcttgttcccaaaatgtttgggggttcaactgaacccccatttcccatgttagatccgcccctacccatgtgtttcgaatgttttttttgccatttttgatcagttgttctatttgatgcctccgattcgcttggaagctatatttcggctgatacaggggcgttttgtgtctgatcgcttgtcctctgtttgatctgcagaggtaattgccttgagtagtgtcggattgcagctgcattgcttctgtgatgcttgggggcgttagaacatgatagtattgtgatccttcatgtgtccctgattttctgtcctcaaaccgtgtcagttattgaagaatatttttctacagttcttccttgtgtccaccgcaaatgttttgtgttgatcacagcatcacatgggcgcggatagaacatttgtgggtccctagttgattttttttatgggaaccggggttgagatcatctgtagttcatactgggagtcgtaccacttgacctgctctctctctctctctctctctcttttttttttggggggggggggggttgttctcttacaactttgttcaggaatgtttaggatgaaccacctagccctggatatatttgaaatatcattttgttatttttttcctccctttttttttctggatttcaccttttctgttgaaagttctcagcagttccttgtattcagtattcacagcataactccgagcatcagtacttcgtttcatttggttaatgccagatttttttggcaggttcgacagcattgtttgaggttcttttaaaagtgttctcaccatggatcttcgccattcacaaactccatccagtgatgacgagacaagggcacttaatgcattgcttgatgctttcagttctgccttttcgcttgatgatatagctacggcatattgcagagcaaatggtgatgtcaacagagctggtgatctattgactgaacttgaacatcctatggccaagagcaatgaagttgactcaagtgttgggactattcatcccccaagtggtaaggcaattgaagaaaacagtacagagagttcaggccaagcaaaatctcgggaaaaaatgcagaagtctagtgcttcatttggcactgtatccagtatgttaggaaagggatcgaccagggctacagtacctttgatgaatagagcatcaggaaaggaaaaacctccaatggttgagttaccagagtacatgcgggacgattttaatgggaaagttgataaatctgattctgcaccaaagagagagactttgaataatagagatatagaggaatttctattttctatgcttggagaaggattcaagctcagcatggacatgatccgtgaggttctaggtaaactcgtgcgtgctatgtgaggccatttccccatattccacttgcttgtttcaagctgtttttaactatctttaatttcttatgcaggcagctgtggatatgacattaagaaggtagtaatcgatcactactgtaaagattatgtattttttgtgttgacactgattgtcgtatatgcatcaaaagggtttagagttaggtcatagggtgcataattcatttaatgtaccttctcatttgcacacctaacagaatcatggtattttatgcagagcatggaggaactgatgtcagtttctacaaaagatacaagcaagaaggcagaagacaaacattatatagcacaggcaagcttaaattttatttttgctacttcaacagtgttatatgactttcttcttcctttgtacttatggattttgcttttgtacctgtacatgttaatttctccatgttgctcggctgaaatatggtgaaaatcttaagtatttatgccccattatatatgttatagtgctttttttatgcagaacttcctttatgcttattttttctgtacatatttttgtactgttccattttacctcaccaattgaaaaattatggtgcttatatatttttgtacatgttatagctagcactcgtgcacttatttattttaatttaatggtacagccctttcgtaattactaattaacataggacttgatatgctgtctcagttaagatgttagatcgctagttccaaatttccaattggtaactgagcaacagaatttgttattggttaatgcttcgaattttttcaatacagctactattgtatgtgaagggagtcagaccactctgttatattaagcaacaatatgcatgtttcatgggtttcatattgtataaacattttaattatatccaccctgtgtcatgtaatggtgcaggatgcagcagtagaatgctcttctacaaagggaagctgcctagaatcacaatccacctttaggttcttgcttcttctcttcattattggtctgttcctatcttcccatcatgaaggctacatctattttactttcatcgacactcttctttgtaggaatggcagtgcctattctttgcgaggcaagagacatagctcaagtcagatttctccaggagagttgctagtgtcaatcttcactgtacctgaaagatccgaggaggaaccaataggaaaacgatatgaactgggtgcaaatcgaaacagagtaccagatcagaaaccagttgtagaaccccttgaggacatctcatcagaaactaactgttatccagtgaaagttatccttagcaaaggtatattgttacacacttctgcttccatatttttcgcttttctctgaggaatatactggcgttatattctgtccctttcatcttttattgtaatttctatgcttttttgcatcaacattgtatcctacaacaaaatttactgtttagactgcactatatgagatacctttcaaaagtagtttgcactctgaattacataattctgttcagtaagccaaacataaagttcaagatgatattgtgtgtatagccatgtattcttaatacataatcaggacaaacatcaataccaagctcagttatatttctacatgatatcacatttctttagcctgcaccgaacatttgtggtagaattctgtctcacaagtcctcttttaacaatctgtgatggatgggtaaaattgtaaatgtagtttacctactgtatgttgaaccatttgacttatttagagtttggacataggagtatcatgtccatcacagtattagatctatatggttattctggatggttatagacctacagaatgatagtattaaagatttgcagtgatgtatcaaatggatttttcgctattagttggtttgtacatgctttgcatcttagtactgatgttagcagatttgtttgaactaagtcaaggacaactatgggaactgtttatgttttcctttttcttaatgaaatctttcaaactatgcaagtcagaaagtgatatccattgtgttctatattttcatgaaggatacagaggacacaattgtgattacaagcagaaaatatagtttgaattaatataagcttttgatattttttaatcaaaaccttttgataatttggtgataaaaactgctaacatgaagcttctaatcgactggtctcttaagtcttcacactctgccttaatgcaagatgtttgtcataattgagattttatcatcctgtattccatgaaaagttataatgcattatttgttttgaaattgttttggtttgtatctagaactagttgcacataatgaggaagattaccagaactatcgtagggctgcgaagcagcattgggatatgatgaagcaatactatgagaaggtatgggggcttcatgatgattctttatgctttgatgtttatttcgttttctgcaaacagatcgttttttgttttttccatgttgaagaattttcaatgaaaattccaggctgttgatgcttttagggagggtaaccagaaagaagtcgagtatcttcttggggaagtaagtaatcattttcttgagcaagaactagaggacattatttaatattatagtggggttttgaaccaggggtcttatgcatttttgtcaaaaacgaacctattggtatattgatagaggaatacatatatcttggccagcagagttattatgtatgacagtatgagtgtatgagtgtgactatgggcatcgtcattacgtttgaatgtatgattatttggcctgtctttgagctgcttctattctctaagtaaaaatgtactacatagaaacatttgccagcttgtatatgctcatctgttgatgtaatggccacttctaaaaaaacgactaactggctattctttgttggatatcaaggggaaacactattacatgatggctcgactggctgatgaaaaatcttctgcggagattgtcaagtcgaagtaagtgcgcttcctttctgcattatagctgaaattaatctgttacgtttgttgtttctttttagaaaccttacattaccaagtttatgggtcttcttgcagaaaagtagagtcaaagaatgagttgtgtcttgacctgcgtggacaagatccagccaacgtagcaaatctcgtgagacttcatcttagacagttgtctaatatcccatgtgagatgagcacataaatcttttcatttcttgatatatatttttttgcgtagtcttatctaatttacctgatgttgtagcttttgagtacttgaaagtcattactggtgctgaggatggcagtttcaaatcggcacaaagaagaagaaaggtgattttctcaaagttgctttactactactgaattttctgcttcatctgctagttatctgtgtgcatgactcagataccaattattaggctgcactatgttctttatccaaactacaaatatccacctagttatcttggctaatataagcatctagtggcattttgctctataaatctgacatcattagttcattgcactatttaactcagtaatggttatgaccagtcctttagccaaattatggatcaagaaattcaaaaccacacatgtaaaaataaaagagaataaaataaaacagaagtacaccaagggcatgctaaactttaaaatgaagttgtaggtatgggcggtacagagtgatttcctcagctgttttaaagatgtggaagcttgcatgcattcatatgttcagtgtttgttgtcctctgctttgttcttgtccttttttggcagcaagatttttagattagtggacttgtgcctaagttgaacggtttctttatttatcaatttgctggttgagtactctgtaggctttagtttttccattgtggtaataacactgtagcgttgttggtatgatgcgaaaagcgtaatatgcttgaatctctgcatgtacttttgttaagagcttttgcaattactactctttgaactctggaatcttttgccgaagttaagacttaggaggcattaatgcgtaattccttggtttgtactatatgacaaggagagtggctgtttttgactgcaacgtgttgtgcgaaataccacgactttagaattgtaactacgtgctgcacatacatggtattgaactgtctttacgtgatgaatttggccaggtgatgaagtatctggagaagaaatcgattgtgtggactgaagaggaatccaaccctgggaccatcctcatcccaattaatcagaagcaggatcagcaggattaggttcatgtacaaaggtggtggctctcagtgacaaactgacagaagtcgatgttcatagctgcggcatcattgatgtccattttgaaccttactacagtagttctttcccttctccttttgggtatttgaactgtggaagttacgtgcactgcattcgttttgtctgcacattgcagacatttcgaactcattattgccacctcgctagtgccagaaggaagaaagaactgaggccatggtccgacagaaatgcagcagtactagtactagtagtaacattcttgtcatctctagcatcgtgtcactacttaacagcgtccgctcggcagatgaatggtctcacttgtttaacactgatgtgcgcaaaatggcatgctgcatctctgcaaaatgagtcatcgattcacattggcctttgcttaagcagcgccctaaatcagaacatgctcgaggagttgcaagagggttgctttggatggcacggcagtacggaactgctactgcctactgggcggcatgacgcaccttttttttttttacctatgtacacgacctatgtacacgaaagttaggagtacaacttggatctcctggaaggtgcagatcatctggtgtgcgccgctctcagaagagaagcaggcagagcaccgcgaacacgacaaggaagaaccatatctggtgcagggacctctccacctccatgtgctgccgtctcagcctggggctcatgtggtaagggctcgtgtagtacgcgctcgccgccgccgtcgccggcgactgcccgcgcgacacccacgggagcaccgccagggccatccctccgagcatccctccggtcgttgtcgtcgtcgagtggaacatgcccacgccgcccacggcagcaggtggtggagggtagaccacgtcgaacaaccgcgccggcgccggcgccggcgtgctagcggcggcggcgtggtgattggcgtgccacggtgaccggactggcgggctggatcccgtgctcccgtgtcggtgtcctccgtcgtcgtcgccgagccgatcgctctgccgctcgacgggctcccgatgtacgatcggccggcgcgggatggccgagccggatcgggccctcttggaacttccgccgcggccgcggccgtagagcggcacgagcgtgtccggcgagaccgcggccttgcacacggggcagggacgccgcctcgtcgagctcgcgtcgccgttgcttccgtcgtcgtcgccgccggggtgcagccactcgtagatgcagggccagcagtagaggtggccgcagagggtgaccaccggctccgtggcgaaatccaggcagatgttgcagtcgaagcagccaccgccttgcgcctctgccgccgccgccgccgccgccgcctccgcctccacttcacctcggactctcaccgccggctcatcgccggccgccaaagacttgtcgctgtcgctgcctccactcgtgcaaagctgatccatccccacctcgatcaaacaaaatctttccttatatcgatggttcgccgggctgcaaagctaacaggaatgtcagaccattataagtttataaccgacgacaaaagaagatggattgatcagcgagcaagagagaaaaacaagcacactgtccacaccaatccctcaccatgattggtcaccgaaacgtgtacgatgaccggtcagaattcaggcaaagcaagttgtaccgttttgtccgtgcgaccggttcgtgtgctggtgataggccgctggcagcaaaaatggacagtggaactaaccacaagaagaccaaaaccgtagggttttctgtctgaggacgttgtttagtcctaactagtctgtccaaatccagaaggtcccacgtcgatcagacaagatattttcagataaagcagaggatttaaataaggctccatgcctccataccaaatataaacaaccacagggcaaattgtataagaaaactactattgattaaattttactttttctaaaaaaaattgttcggtcatactactagtttagcttcgatctatatgttgctatcacatccagtcatccactacggtggttcgattgtagaaatgtcattgatgattgattgcattgcggatttacacggtcaccggtcaccacaccagtcggtaaaactagtctgattgcccaacctgaagtggatacaagaatcttacaggtcaaaacccgtaattatcaacccgaattttgcatttgtttatctttgcaaaaacaataacaagaagaagagagtttgcctttgttttttatagaaaatagacttgctattgccttgagaggaaagcaaagaagaaagcaattaagcaatccggcatttataatctgcttacgctcgatttaatttggacaacgccaccaggtcgctgaaacactgaccggattagcaccactattttttgtcaagaaaaaataagagatgatcagtgaccacacagcgaattgtacggagaagaagacagcttgccgaccccaaagcccaacctgatcttgctccataagtatgattatctctgtgtttttttttccttcaaagaaactgagccgtcaatcggttctttatctatgttaataaaccgaaaagcaaacgatgaagtggtgtaataatatatggaataactagattcctgactccatatgtagcacttgacgtattcaagcgactgaacaaaaccaaagagaaaagcacatcatttcttattatatagttttaaatcatatctagtgatcagggaagatgatgattcaatcttgtgataagatcaggaaacaacaaatattcggccaacaacttggagttgttttttcttaaataatattagcccatatccacagacgatatgtgcagtcagaactaaggtgcctatatgcatttctctcctttccttatcatacatacagctccaagcacgtcgtttttctacagttgtccagctagcgtttttgtggccaagaaacaaagtactgatgaatagtacgaatcatgaaaatgagatcaaccaagatacatcacaaaattgctaatggtaccccaaggctacaaataaaaatgcacaagcagaaaagttcagtagaactgtgcaaagcttagttgcattgatgcagcttttcattgtcaaattgtttgtgtgccacaatatcaatatgattaaacttacacagatataggttattcggattagtaccaaacaagaatcattccatctacacatttatcaggtatactcaatcgacgtgtaagtaaagagtggaagcaacatcttaattattccttctaattttccaatagggttaaggctgtcagttacacttcccatcaaagaaaggataaccacatgtaaacggccttgagataaatcacaagaacaaatgggtgaaacataaaactagtaacaaacttctgtttagcatgcaaatgaattaagatggagaaaccaaggcatataattactaccatgtttatgagtttatcctaaaagatttggtgacacaacagggctgaagacaaatctggcaaaatgcgcaattacaccaatccggtgtagcgagcagcagctccaattgatcaccgacatccttcgctgcaagatagagcaattcccaattatatacttggggataccgctatccatgagaagaccaacaaagatggagttgcaaccaatccttgataagcttgcaaaaaaggtagctggttggaagccaaggatgctatcacacgatggcagattatgcttgatcaaatcaacaatgatggccctccctgtacacacaatgtcagtgattcagctgcctaaatgggcgataaaagaaattgaacgcaaatgcaggggattcctttggaaagggcaagaggaagtgagcggtggacactgcttggtcgcgtggaaaaacgtctgtatgccagtggaaaatggggggctggggatcaagaatttggaatactttggtcatgcattgcggctaaaatggcaggtcaccaagctacagcacaagaacagaccatggtctatggtggactttcaacttggaggggaagtggagaaaattttccaatcaatggctgagttcatcgtcgggaatggacaaaacacaaaattttggacttcaaattggcttgggggaggcagcattgcctggaggtggcccattctatcgacttatgtgggcagatcaaatctgtccgtggcacaagctctaacaggcaacagatgggtgagagatcttcgtggctccctctcaaacgaagccctagcccaatacttcgagctatggagtgagctacagacgatacacctaagtcaagaagaagacagcattagatggaaactaacgccagatggccaattctcaagcacatcagcttatgatctgttcttcaaatcaatggagctgtgcccggtgggagaactaatatggcatgcgaaggcaccatctaaaattcgattcttcatgtggttggccacaaaggggcgctgtctaactgctgataatcttcagaagaggggttggccacactctgactgctgcactctgtgcacacgagaatctgaagattgcgcacatctgttcagtaaatgcgtttatacagtgagagtttggagtttgttgcgcaattggatcaacgttcccttccccattcctgggagaagcgaacttgggctcactgagtggtggatgcaggccaggctgcgttttcggcactgctacagggacaacttcgacagtgtgtgcatgctagtttgctggacagtttggaaagagaggaatgcccgtgtgtttgatcagcggtcgaggatccctgaacagttggccgaagcaatcaaagaagaggttcttctgtggaaggaagcaggttattttgagacaaacaatagttagcacattttccttgtttgtggtttgattttatttcagcttactggggctgaggctaagccttggtcccatctcaacagcctcctgttgttgtaagcaaaatttgtatttttctcccctcaaatcttaatgaaattcgctcgccggttccttcggccgacccggcaaaaaaagtttatcctaaaagagtagtaatcgtatcttgattgattaaatgaaaaccaagaacaaagatacactgacatgatttcctgtcctaacacacatacactacgacggcttaaaatttcgaacctgcctacaatgaacaatattagttgaccaaattagcacagttcatattttataaagaaactgtgcttggctcaaagataacatactgcaatcaactgcatcaagccatcaacaagtctgaaagaacacgggtgcataattgaccaagaccaaaactcggcccattggccattgcgaatcagtttctcatttcatttctctacttttaaatgatctagaagcatggctaaaaagcagtaagggcaaagctccaaccctgaatcaactacaaacagaatcatatgcactcaaactcgcaagaattcacctgatcgattgaaacaacagcaggcaccagcaaaagaaaccagaggcgccgactcaaaaaccaagaacacgatcagatgagatcactagttcattacaccatcgcatcaccaacaatcaacaaagcacacggagcaatcagcaaacaggagtatggttggtggctgacctgcactggctagcaagctagctagcagctgtactgcacgccggacgtccgcctcccccctgtctctctctctcccgtctccatgcagaggcgacgactcggagcagcagggagaagaggagaggagacgagtggttcgccgtcgacgtcagtggccggcgcggaggccgaagtgggaagtggacggcttcctgcctttccttgccttcctcgcggggagcgacgaggggaatgagagatttcctttttcttttcttctcttctctttccctcgctcgccgtgaagctttcgttgcccaagggaaaccggttcccctgcttttttttttccttgtttggtgggtcgctctgctcctgctaattagactattggatttgattctctaaaggtcgtcgcctctgatatttttgtaaggataaacataaccatcttatttttcttgaccaagaacttaatcgtattgttttctataagacaatggaggataaacatagccttttttttattcaaagaatgtgaacaaatgatgatcctttgtggtggtagggggtgtagggttgttggtccatttggctcaatgcctcagaattgtgggccacggaaggcaacaaaaaggagcgtaaaaggcaaacaaaagggagtggaaacagcaatgagaatctttctcctgcacacacgtacgcgccatcgaagattttggagtttgttggcatgaggtgcggggagagatgagatcttatccggttaatcatcgtgcccccgtttcactcgcacgcattgctaggcgatgaactcgcacttgcgttacgcaagttgcgtatgaaatgccgatcgctttcttgtggttattagtacttgtgagttgtgaggtcacgagccgttgaatcacaacggcgctacgctacgtacgccaccgttgccaatgggcgcgacgcggttggggccgagaggcccaacgggatcacggcacggcgcgccacggccgccgccgcgcgcgggcgtcacgatgagatcgttcgccgtttcacgagagcgaccccttccgtatgccgccatacgctcgctcgaactgcccggcgaccaaactgtccgtgcttttcttgtcgactttgcatcgcggcactcgtcactcgtgccgatcacgacgtgattgtcgtcgccaatcgccgagagattacggggcactgttggtcgatctgaattatttattgcactagctatagcgattccgtttcgtgcactctacaccaaaatcacgagccacacaaagtcacaggtacaaagctatacacgtactcacccgatcactcaacacgactacacgagcagaagttgcatcttttgcattcgcgggtggccgcagcagatggacctaggtgaggcccgagcaatcattccgagtgcacatcaatcggcttgtgtgtcgcgtggagtagatcgcctgtcgcgccaggcaagagacgggcgaattattgtgcgtcaaggacgcaaatctgccgagttgccgacgtttgttcgcgacttcacgagtggctatgtcgcggtacctggggcagccgtgcagcggggcagtacgttagtacgtgatgcgagctcgtccggaaagaacagcatgtgccagtccgatcgcaatggcccagcttgctcagcttccgttagcttggtttgtgatctgtggtcactttcccctgtcctacatttcatcaagtactgtactactgttcacggagaggagaggatccagatcctctgctaatgcagagggtggcattagctccaatcctattcgtccatcatcatccaacggcggcagcttctttttctcttcgatactggtaccagaaacaaaagtcctcgccggtgaccacaaatcctctgccaaatcctagccatccatctgagagggaatggctgcgattgctttttcttattgattccattttactccctccgtccctaaaatatttgacgctgttgactttttctaatatgtttgaccgttcgtcttattaaaaaaaattaagtaattattaattttttttctatcgtttgattcatcgttaaatgtacttttatatatacatatatacttttatatatacatatagttttgtatatttcataaaaatttttaaataagacgaatgatcaaatatttatggatggagggaatatcgatttactcgaatcgctggctcgtgaagtatgttgcatcgccggcgctgcagaagctatggatgaacgaaaatcatggcgttgtgctagatattaaagggttggcctgtggcgcgaactgcactacggataagcaccgagagaaccgatcgttgcatgcgctgttgcttcattttctttcgataatcatgagctcggtgttactctcagcttctcatggtggtgataatataggtcaagggaagaggcgcagcggtttagatcgccaaagcggactcattgccgttgttgcgcttgcattgctgtggtcaccggtgaggaggacttgtttgtttctagtaccaatatcgaagggaaaaagaagctgcagccgttggatgatgatggacggataggattgaagctaatgccaccctctgcattagcttctccaatgcagaggatctggatccggagtggatccggagaggagatccagtcaggttccatatactgtggtggcagccagttgatttccacgtccactacttgttcagccaggtcttgagtggaagtctctctaaaaataaaaaagggtctcgagtatacgataggactttatttcgctgcaacagccgaacaggaatgggtgaatggcctagttgcccttgtagatcaaacatatgcttgatctgttgatcaagcattcatgcccacactcccggcaaacatttcatccgttaaaatctgataatgacaattcggccgaatatggttatcatatcggcatttagtagtactagtatacaatccaaagaatgaaacaagcaactcgaagcaaccttccataccttcgatccagaaggccacgcagggctcagccttgaattgcatttattagcggttatcacattattatgtacatacaactaccaaaccggggttccataatttacgattctcctgcctattctcgaaaagaaatggagttcatagatgacaatatatccatctgggcgtgaaggttgaagcccaactgcctagaaaatattcaacctgacattttacctcccgatgtatttgtcgatgctgctgaccagggtgctctcgggcacagctccaatcaccgcatctttcttctcaccgttcttgaatatcatcattgtgggaatgcttcttatcccaaactgggttgctatgtcggggttttcatcagtgttgagcttgtagcagttcagcttcccttcatattcttttgaaagtttgccaatgacaggatctatcattttgcatggcccgcaccacgaagcccagaactcaacgagaaccggaagttcactctccaccacaagtgactgccatgttgacttagtcacgtcaggaactgcaaaagaattatgttaagagcatattaactagcatattaatcaccacaaaatggggatatataaaagctgttcgatgaaattgaataggcccaggccaacatataagttttccacaaactgaataagcatgagttggggggatgcacccctctgtcatcagaaaattaactgtgccattatctagcaaatattgtcatagctaatagaacagtcccgcaaacagaaatgaaatatggaaagtgaaacaatgaaggaagcatatatttagaaaccatacttgcataaaaattggaggctatttaattttttcagttgagaagtgttgaccataaacataaagccttagaaaggaaaccatttttgagggtttagtgaggaatgccttttaggactcagtaaggaatcattatttgtggacttacaaggaaaccctttttgtggacttactaaagaaactctaggtggtgactctataaaacagatatcatcttagagaacctcttttactagtcatctaagcacccctgcagcactacaaggcatctgagcatttgcaagctagctgttgagtttgcttgcatggatttctatattctgtttccaccttgtaaatttcctttaactttctcagacaaaaacaaatgtagtaccatacaagtataaatccacctaaatgactactgcaaattgacacaaacaacatgaaccttataatcatagaatcaaagttatagtacatgtttctcgaaagccttgtgtgtataagaacatatagccaaaagtttggtctcaatgtccatacaacatactccctccgtcccataaaaaaccaacctagtaccggatgtgacacattttagtactatgaatctggacatagtcctagattcgttttttatgggacggagggagtacatcaagatgtaataaagtaacttattttttaaacgatttaccctgcaacatcttagaggttcagtttattcaggtaaggtttcagtacttctactaaaccaccttatccctcccatttttcaagatattagacctatatctaatatctggaaaactctccaatcatgcctctctcaatgaaacagacaatgcttctccgaataaagtgatagttcaatacgtgcagctagtactaagactaaaataaaacatctttttagcccaacaaagatgatgcgatccatattgcaccattcaaccatcattggaatttagaaataatgtattctaatatttgtgttgccttgtccctttagtgaatagctcatctgcacttttgagaacaaatcagtgttaggactactgtcataaattgatgtgtaccactttcattcacctatattaggtgtacagtctacttgctttgggctaaaagacaaattagaaaatcaaatttataaggatgtctcatttgttggtctactgtgtgtacacacgacaggtgcaattggaaaatcttcagtggattaagttagaacttagccgcaatggtgctgttctatcaccgcaaatcacctttcatgatcggtgtctgttccttaaaggagcaattcctaaatccaaagtggttggtctaaactccattgtcacactgacagctagaacaatctatctggagcataacaatcgcatctttaaactaacttttaccacctacagcagatttgtagagaacatcaagcagagtgccaactgtggagggaggtggaagttatggtaatttccacttttccagtcatgcaatcaacttggttgtggacaaagtcatagtcttcagggcagtcttaatttgttaagctaacttatgttaatgatttggtgtatgtgggtattgaggcacccattgaattcttgtacaaaccatttgcacatcctcggtttaaaaaaatgtgcatctcccttatattaaatgcaatatgcatgcttgttgagaacctctgtatgtaatagcaagctgctaactgtttttaaagttggaaaattaattaccatgcaattgatggtttattagctgcaaccagggatattagagggaagaaattcatttgttgctgggaaagatctgagtgccctatagttacaaacaaacaaaagaagaaatgctgttttaaaaagatgaacacaggaagcaacttctaactttccatacagcgtacaacaaaacaaatgttatgtgttgttactaggttcaaagcaacttcctcacttttgcatacatgcagatggaacatgaaggacatacatagacacgtcttaacttaaacaacatatatagacaggccttaagtatgtgatttactacttgttcgcatgtgccttacggaagtgttcgcacgtgccttacgtaagtacatatattgttgatctccacgcacacagcacaattgagtgcacgcattggtgcacagattgtccatcgcgcaagaacacacggaggcaatgcagcatgcctacatgcaaagatgaatgcactagagcaagcgtagttgcgcctttctgcgtcgattgttagtttgttacacaatgataccttcaaggtggtgtcataacactgtgctacgtgctgcaacactcccttattatccagaaatcctcaacgccgagttaactacagaaaccagacctaagacaaaataattccgaaacccctaactccacgtaaggctccacaaacatagcagatcgccatccgaattgtctaaacggatgatcccgaacggcagtaagcaaccagcgaccagtacgacgacctaattagatcagcaccatttcaccaccccggatcgacgcatgaatctaacgcgagcaagggcaacagctctaatctctcaaagacgccggagaaataccttggaaggaggtctcctggccctgggcggcgcacaccaccgacacgccgcgggcgcgtcccgagcggagccggacgaccggggcagcgcggacgccccggcactgcgggaggaggcgacgctgcggggttaccgcggcgacggcgacgggaggagacgcggctggcttggcgacggagacggcgagggcggaggaggccatcggcgccggcggatgtggacgggcggtggcggtggcggtggcggttgcgggttcggtgaggaaggcgacgagtctggtggggatgagactgagtgaggtggacagataagctggggccgcgggtcccccgctgggccgagggatgatccggcccattacgggagaaagcccaaacggcccgtgagcccatcatctgggacgcggagcgagcaagcccaccacccacccaccctgcctcgctcgttgccggcgagcgacgcggcgacgcgccattgatttgcgcgacgcggaagcctcggcggcgcgtcgggttctcctcgttttgggggcgcatgtgcgctggcgcgcgagaagcggcgagggagaaggccgatggccacccatgccatgcgcctcctctatcttcgtcgtgtgggggtgagactgagaggagggggggcgctccgaggacgccggcgagcgaggcgagcagccaaccgcgcataagtttaagggcagccagccatgagccaccctccgagatccggatctccgcgcctgcgtaccatcgatctggcaacgaagcggcctgcagcggagcagcgcggcagggaggaagaagggaggaggaggagatggtgcacgggacgctggaggtgctgctcgtcggggccaagggcctcgagaacaccgattacctgtgtacgcatcagcttataattcctaatccttaaacgcatttgcttggtacgagtagcatatccttaattttggtaggaggaatatcaagatacttccgggtgattggggaatttaattgcgttgctaatcatgatcgatgcatcgctttaattggggctaacattttgtgttgaggaacatgatactagtactgctagctagctgcttacttctgagtgatgtatctgtaatgactaatgaggtccattctcttctctatcgatggggaccgggtcattggggctattaattacgctgctaatcttgattgatcgattgaccacatgtccacatcagatcacttcttcggcaattggcactccagtagtacctgccttattagggaaatgatatcctggattagattagttattagatgtttagatatacagatttcaggtggtaggctggtagggcactcgtcattcaagtcctcaaaaacaagaagtcctagtagtatgtttaagtgggcttatcgtgatcttttcgtaatttgatccctggcataacatttgtgcataataaagtttcatgctttgcggtgtatgtgtggctagtggtttcagcctttttattttccatgaatgtttgtcgctactaactgtgaaatgggatgcaataaattaccgaatcaggatggtatatagcttctgacaatgagagtgtcggagtgcttaaattggatgcatttgttggttgctttgacattttattcttgaagttggagaaaattcccggttatgatttttctcgttggcaaattgagtgcaggcaacatggatccatatgcaattctcaagtgccgttcacaggagcagagaagcagcatagcatcaggtggatactcttatcagtttacttcatttttcgaattcttgttcaaccattctgcttatgcattgttggaatgtgacatcttttgcactagtcttgtggtgcattgcggatgaatggaacgatctgactgttagaattataccaaaagaatgcattgccatgtgcaacttctgctatgtggattgtggtatgctagaaatgcatgctgttctatgatcgaatgataagcactaattaggaataatgaacaaaaaatggtgctcaaatatttgtaataaccagaacttctctaaaggattttttttcctgctgctacctcctagaactgtttgattctagtgttatgcgccttgaatttgccttagcggctgtaacatggtccacttatgcaggcaaaggaagtaaccctgaatggaacgaaaactttgtcttcaccgtgtctgacaaagctacagagctgttgatcaagctcttggacagtgatactggctcagccgacgactttgttggtgaagcaacgtatgcatatctactcatccatgtctataatcctgcaattactgttgttaaatcaattgttttggaatcatttcagagtaaaccctcttaaaattattgcccttacttttccttataatgctcaactgaactgattcttgcaggattcctttggaagcagtgtatactgaagggagtattccaccaactctgtataatgttgtgaaggatgaacattactgtggagaaatcaaagtcggcctcacattcactcctgaggtagtttctaaaaaggctggctaaaaatatatagttatagtgcattcttaaatctggcgttcaaatcatcacttcggttattagcgactgctaaccaaaaaataaaaatcatagtaacatatattaaccacctttcacaagtttatgtgccgaactatttggtgaatggaacgcaaaatccactcgtttcttcctgtggtgtgtgcatcacccacaaaccaccaaggttcacctatgtgggcgggtgatatgacaccactcttccgttcttctgttcttgagggctttgagcgtacagctggatgccaatacttctagttctgcaaactgcaagcgtcctcccttaatggcttttaaagagtaggtgcttatgttctggcatccatgatacaattgaaccggacaacgataatttcctacctttaaggtctaatgcttaactgaccatagaataagctacatcttgtaccccccccccccaatgacattgctggcaaagtggtttatgttttgacagaacttgtactctgttttcaaatgcaattgtacatcttgttggggacttaggatagagttgtagatcgcagtagtgttaatggaccatttgcttgaaaaatttcagtgggatgtgcatcctgttattatatcaacatgtctcattctacttctttacttcctacatttggaaaatgcagctaatatagaggaatcactgacatgtagtactttttctactcttctctaccattaccatttatagttgctcttacagagtagtggctaaaggcttgaagcctgtttggatgggattatgattgtgttgcttcaacttcaacacactgaaaaacaaatatagcagtgcttttcagatagtctgtaatttttatgctgtatgcaggatgttcgccagcgtggtcttcctgaggactttggtggatggaagcaatctcgttaagaaaagcagatgctttcaggtttctacagtactatcataagtttgttcatcaagacttgaaaccctgaatttacatgtcagtttatcaggcttcgtcaatcatgtttttttagggaaaagaaaaggatatttgagggaaactttgtcaatcatgttaaaaaaaagtattatttgtctaaagatagctttgatttaggatgttgatatactttcttaattattactcgaaattatatgtaatacggtttgttgctacttctcgtaatagaaactggaagaactgtatttttcttgttcacatggatgatgcccggtaatatttgcatcttgtctggtgaaaaatcaattttcaagtatctcacaactttctactaattttcaacttaataaatgtggctgagaatatgttgtacatgcttgctaaatttcaaaaataaaattcagtctcaagatacaaaagatcattcttaaatgctttttttggggggaattttcagaagcttacaagtatgatgaaaatcggtttcaccagatatgacgactggttatgacttatgacagcagagtagttagttatggatttttgttttactttgaatttttatcttattgaatgcttaaggatagtaaaatgggttgtttactgtttctccttttatttttgtggggggtggggtgggggtgttgtaaatggctggagtaattttgcatgagagaaacagaatctcgcaggtttgcggcagcatctttgtttgtggtcctcaaacactgatgaagaaatcataaccctgggttatgattcggaatgttggtaaaaaagtaaacgtaaaaatatctgaaatggaaactatgcgatgctcctttaccttgtgtacgagggaactggagctgcaggaggttgtgctgcaaagtatccatgtccccctctcccctccagtgaccggtgatctcctgatctgtatatgtttctcgtgtgttcaattcaacatattgaatgcagtaatgctgcccctgccagctttcttgactcgcgcttcagctggtctctcatgcaatgtacctgctattgggatagcagtagtggactaagaaaagcattattaattttcttttcttgtgggtaatttcttcataagcttccaacccacaagatatgtgactctcagatgcacctgccactgcaggtttagagattgcaaaatcataccagtatatccctgtaaagcatccttgacctttcattgagccctgaatctgaacgtataaatcttttccggtgatatgatatatggtatgttcactttgatgccattttcaatcataccattttttggtaaagctgtcaaaaaatgtctacgtttaatttattgtcaaatttagttcctgctaaaattttgacaatattgtcatcttagtaaaatttggtaaggtttattttggctataatatgaacaggtccataatatttggagacgtgagccttcccacatattcctttcgtcccataaaaaaccaacctagtatcaaatatgacagatcctaatactatgaatctggatagatgcatgtccaaattcatacatctgtccagatttataggattatgatatatcgcatccggtctttttcatgagacagagagagaaagggggggactttatccttgtaaatttctacacatgccattttcaccatagaaacaatgaaatgcaaagtgccaaagtgcctgaattgtaggatttaaggactccatcatggaataagctaaatggcatatttgcaaaccaaaaataatttgtaaataaaacttttatatacgtgttcttagttatctaaaagcaaaggctaaaaattaaactacgatgaaaaaaatcccaatatcaacttttaaatttaagattgaaaattcaaattttagcttataagtataggaataagaggaaagatgatattgtaagtctgctcagccggaatctgtccttgaactgcaggtaaaggttactcgcttgctcttgtgcacagggcactccatccctcatctgtgcaactcttcttcttctttttttttttacccaattacacataagatgtacatgtacataagccgctatctatgcacaccacactcgtagacctacgaatgcgatgtctgatacattgacataggctcaaagagacggaggccagatgtttttattgaaccacccttatgttcataatattcataggtattagaatttaaactctaccggatgaagttacgtaccccataacttcaaaccacacctttattaaaagaaaatctctagaactatttttacaactaagcacgtctatcctaggcacatgaaaacaaatttcctgaatagtgtgggaggcatgcacacgacagaaacaaaaggtaggttagtgcatgcttcctggtaaccatacgtgaaaatgacccccaaaaccacacaacacatcaccacaaaacaaaagatttgcttcactgcctcagctctcaactctcttccaaacagtggcagttgtctgacggctgacaaccttgatcgatggaacaaaacctgtttttctcatgctctttgacaaattttggccagcattctttcgtttgtcggccttgtgaaaaaaaaaaggtactcaacagctttcaagttctttttattagtctctttgaagttgttgaaacttgaaagaaagatgaactgcactgtttccagccttttctcctactgtgtattacaatggcactagtacaacaatcttgtgttgttgagagagagagagttgagacctttgccgtgctaaactaattacagcactggtcaactgtatgatactctctccgtcctaaaataagtgcagttttatactattcatgtttaacgtttgaccgttcgtcttatttgaaaattttttatgattagtatttttattatgataaaatatgaatagtactttatgtgtaactaaatatttttaaatttttcacaaatttttcaaataaaatggacggtcaaatgttggacacggatatctatgactgcacttattttagtacggaggtagtatgtgtgtactcttctgcacaaccaaaagagaagcaaaacgagaacgtaaaaagaaaagaagtgtagaactgagagaagccgtctgcacgcatggaaacgtacgtgttgcagggggtgcaggaataggatgctagttgtgcagcggattggggccctggggaaccagcctcttggactcaccgtacatcgctgccctcgactcgccggggccgggcggcgccgccgctcgcatcagcaccgtgccgccgtgcttcggcgtggccgccatcgcgcagtccgcctgtttgagagctctgcagccgtagcccaaggtcaccacctcgttcgccaacagcagcaccaccaccaagaacatgaccaccggcaatggagctccgtcaccgcgtcctctcatggcgatggccacctcgagggaacagagcaacaggttgcgcgcgacgcaacaaccaacaaccagctgagctgagatgatcaagctagctagctagctgcgatgcgagccaggtgtgcggactgcggagatttgaggacggaggggagagtcgttggtgtgggaaggtaggggggagagctgatcagctgggtggccggccggacacgggcacccacctggccagccagagccagggcagagagaagagatgcgagagatcgatggggtcatcatctgtttcaagggtgagaatttatgctgctgtcgagcgcgtgtgatcgagctgagccacagggaacgaacgcggaatcggcggacccggggaaggggagcaatgcaaaaacgtgctcttctttcttctcgcttcgacgagtggatcggagtggccatttaattctgctgaatttggctgtacgtgtggtagcagtggtactaataaccacaaagattctttttcggtgatcagcacgtacctgcaccaccatcttgagtggaaaacagtgtagttttcggggtggaaacttcaggctgattcagtgcagcaaactgtcttacatattggcaagcacttttctgatcagtagacttctctactgttcttagcattactgttctacacgtcaaccctgtggtctcttctgatgatcagtggacttctctacagtgatggacactatgtgattgcactatgggatattgccttctaggacacagaactcccatgcgaggtcttgtcacataacgcaaagttcatagatatcctgctgatgcaggtatcctctgcaaagttcatagctagtagcagcacaaacatgttattcctagcttgtgcgtgtgtgagtagtcaaaacaataactactctctgcttgctcaaaagcggagaattaatcgagtgatttaagaaggacacagcggcttaacagatggctgtaattgcccaatacggtggagtctagctagtgttcgatggagcagtactgaattagtaatacgtattggttgctgctgctgtccaatttatgtggttgccggttgatgccattaaaatttcatgtagttgcaatgagctgggcgtaactggactggacgcccttcttgatggacgctcagtgattacagagcccacatttctgttgggcatcgttcggtctctgtttatattctgaatggaagttattgaagttgtatctggtgacccgttccatgcgaaaaagagaagggtggggggggggggggggtatgagaggaaaaggatggaaaacggggagcatgttaaaatgttattaagggcttatttattttgttttcgcttccgaccctaccaaatctttataaggcaacaaagtaaatatatcctgaatattattaccctattaaaattttgtatttttagacgtttccatttaaactctactaaaatctattaaggcataaaaccaaacatatcccaacgccattaaaatttggtaatgctcgaatatgctaaatttagtattgctaaagattgttaaggttgatttttttggcaagaaaccaaataagcccttaatcttccaaacaatctggattaatccctggatttttatttgtttgtgaaaaaaaagaataagtggatttggagtttggaaatgtcacaacagaagaatgaaaagataaaaggacaattgatgtacccctctgacctacatctctaaatttgactctccaaatatccatttaatcagcttatcttttactcaaacaatctctccattaccttctccaatctaatagtaggtcccatgtgtcaatgtctatatttcttcttcattttcccctctatatctttctccaccccacccaccccacgccccctaccttaccccttacctcatcagcgagacacggttgacgacaatggtccgaatagaggtgctgacaacgaccgcggctgggttctaggcggtgatggtgacaacggagctggcacagagatgatggaggtcagcccaaggaggagccactcatgacaactgacaagggcagaggaccagcggcggcgcaaggagtggcggaggactagcgatggtgcggggaggggcaaagaactggtgggggcggaggatcagcaggggcgtgcaatgatggagtcgctcgatctggtcagtgttgcgaggtctatccgtttgctcggcacagggatgagagagataaagaaggggataccagtgtgggcccatgattggcaagccaaatttggctggcgaagttaaactagtaagcagacgagtttggcctgtcagatggcttagctatcctattgccaagtttgttggagatgcgaatttgtctgaacttaccaaatttggcttacatagtggatgaattggagttcctcttaggctgtgttcggtccagcgtgttcccaaccgaaacagtgcgcacggaaaacggaacggttcattagctcgtgattaattaagtattagctatttttttaaaaatagatcaatatgattttttaagcaacttttgtatagaaacttttagcaaaaaaacaccatttagcagtttgaaaaagcgtgcgcgcggaaaattagggagatggattgggaaacttggggtaagaacacaaccttagggggtgtttatatccaggggcgtaaagttttggcgtgtcacatcgggtattatatagagtgtcgcatgtggtgttcgggcactactaaaaaaactaattatagaatccatcaataaacaacgagacggatttattaagcctaattaatccatcattagcaaatgcttactgtagcaccacattatcaaatcatggagcaattatgtttaaaatatccgtctcgcaaattagtcgcaatctgtgtagttagttattattttagcctatatttaatacttcatacatgtgtccaaacgttcgatgtgaaagggtataaaatgtatgtgtgggaactaaacatggcctcattatttcagcgaaggctatcatgaattcatgatctccattgaaatttgtttgaccgacacactgaccctcaacgatttctatttgtcccggagaaattagaatgcagatcactcaaccaaattaaaaaaaaaggtgcaattataagcaaatttgttgggtacaagacgagaagtcgagaacacaacctacacgtctgtcccctacacatgctacaacggacacgggaggaaagtccttgaaccttttttccccaggtgcactgcctgaaaactacctccggtttgatgggacaaaagctatccgaaggctttccatgccgaccgtgcgcacgacacagcaacactctggcggccggccgctggctctccaaaaaatgtctcacagcgtgcgggctgtggctccgggttctcaccgtgccgtcgcgcggcggcgagccggcgaccaatgcacgcggccggcggccgtgggatcctgcgtctccagcctcgacacggtcacctctcacgcacgcgggcgccggggcttacccgcattcggcccgtttaagcgtactaaacgggccggcccgtataaggcccatacctgaatcttctccgattgagccgagagggggagagagagacggggaggagtcgtcgaggagaattttggaggtttggacgaagacggaggaggagatcctcgccgagacgaccgccgcttccagcatccgtggcggaggtttcgcccgagctcccaccaccgctggcccagcgccgactccgagttcatctcctacccggcttcaggtgattccatttccccaccccaacaccaggtggaaactttgcctacggtgtctaatggaggaatccaaaattaatccgccatgaattgaatttttgcttgtgctggagcaattaagtagttggactccttggttaatcggttctgttcgttattgcttcagtcgattgataggctagttaggtatgctgagtggccgcgcggtgacgttgcatcatagaagtgattcgggcgaacgtttggtaggaaatgtggtacccgatgaagcagagagcggcgaggaggccgaagcttcctccaaggtgctgtaccgagcctcgtttcaggagctgatgcccaactatctgcagtatgacacgatcatatgggccgtgatatcactgctgcttgttctggcatggggggttggcctgctcatgcttctctacctgccgtacaaaagatatgtgctgaagaaggatatcttttcccgcaaactctatgttactgagaataagatagtgtacaaggtagggttaaccatgccgtattggtttgcttatcttcgctgcgagcttaattgtcatttcagtgctgaatgcgtgcaatttcattttgcaggctagtaggccttcatatataccgttcatgggcattgtcaagaaagagatagaagtacctcttcaattggtagttgatgttataatagagcaaggttagattacttaaatacttaagtgaaacttaaatcgattgcttacagacaactccttgtttaacgctaattcctgttgttttgctatattcaatcccctaccaattgtaaaattgcaattctcctgcttgttctgtagaaatgattttaaactttgatgtatctattattgataaatatatatgaatcctgctactgttagttgtattcattgtctcattgatgaagtgcactgtaatagttttcgatcatctacaccttgcgaaaatatcttcccttcatagttcatagagtttacatcctaaaatttgttccaaagaccttttttttattacccttacgcctttgtgcttttgaatttacaaaatgattgcaatcatgcaggttgtctgcaatctgtttatagcttatatacatttaaagtagaaagcatagcctcggggaaacctgctccattggatgaactacaatttcatggtgttcacaatccagatcttctaaagacggtaattaattgcaatctgtagttgctagcaactgaccatatgaagttttttttttgttgatacatttttttataaaaaatatagatataaatgttaaaatgaacctgttacaccatccaatatccattactcttttatggtggaaactatatatcaatgctgggggtttcatcagtcaggaaatgttgtacattcctttgctgattgttggcagtttctgttcattattttttgaaggttataatcagagaagcttccaagagaatccaagaacaccaaagttggaagtacagaatatactctggagaaggcccttctgatgttacaccaatcgatagacttgactctcctaatgcgaaggtagtgtttcagttcaaccaaaaacttgtgtttgtctcttgattttcattactccttttgggtgggtcttttggtcatctatcatttgttttgcttggtttcatccccaaggacgtatactaaccttgtaccatggttgctaagttgggttatgtttatgttttatactttcacttttattctagctcttgtttggttctagaacatgggaaaatgaggtttggtagccttttcaggtactgcacatatatattctaagtcagaaggtttggtgtagtgagaaaaacagtcaaatggttcaggtgtgtgttcattgcataacattaaatgattctatgttcaggtgacagcctcctccaggcataatttccaggaatccaagggcagaattcctaaaagtgacagtatcttgctccataagcttgaagaagtttgtcaatcagttaaggtagataattttgttcttatactcggtaacgccagaccattgaatcaaaacattgttcaaggttgatactactctcctgtttctgttatttgtgcagaatcttgaatctctcctcttgggatcacattcaagggcatgatgagcagctgaaatgtatgttttctttcatcttccatcatacaaatgtgtattgtatgacctttgttactgtctgtagcattgcatgcaatgtaccaatgcgggtaattaggaaacaattgttgatacttaggaaaaacttgtcagcgcttgcaagttctctcattggcaatgtacataggtcatcctgatacctctagtttcgtaaatcctagtacagaaacaaacctgtgaatccaaaagtagatcagtcacacgtgtaagttgatacttaagcatgtttgctatccgaaacatttttttttctttgcccacatatctggcttgatgtgaaagtgtttgttaggcttcccatggatactagcatagaagcatgaaatttgaacatgaattttggtaaaagttaattgtacgaagtgttgcccttgagatgttgaactcactgctgaaacttgttgcatgtgcatatagtgtctttatgggagctaatgctatagcttggtcctgctaatgtttcgatcctgatgattactcatgtcctacacaataacacaatcaagcactcaaccaaactcatctactaccgtctactttaaactcacataggtccccaaggatcaattttgccctgcattcaccaatgggaagagagtacagaaatgccgatcaaaacatgtccagctaggaagagttaactggcataactgcaccgaaatgcaaatatagtgggaccagcgcaagcttattacattcttattgcattatagtggtatttccacactacacaaagattcaacccaacagagctcacctgctggttctctgttgattcaacactgtattatgctaactacctgcagatattatcacagcaatagcctcaactctacgcttccttcgcttcatgtgacgcttccttcggctcatccactgccatcttgattgctgcttgtattgttcccatccacatctggtgcttcctttggttctccagcaacttcatggccgcttgtatccttcacatcaatgtatgccgtttcctttggcttctcaattgcgtcttccagactgcacgtgttcctgtcatcttcatcaggtgctccctttccctcacctgcaacttcagtgctgatcgttttctgaacatctgcatcttctgtttcttcctttggcttccccactgcatcttcatgggtgcttctagtatccacacctgattccagcagctcatccgacttctctacaacatcctcgtggttgtgtgtgctcacatcagcatctgatttttccactgcatctgcatgacttgtagctccattttcctctggttctggcacacggttgctctctattgtgcctacatcgatgcctctatcagatgtcccaccatgagttgcagcatctccctctgacaccgggatgatcttcttgattgttccaaccttcacgtacttgctcatgaatttgccctcccattcgtgtagagcctcgagctcaatggggcctaagccagaaacgtcgccggttaaatcatccagctcgaaggacatcttcgccaaagctctactagcatctctgcctgcaaacagtgcgtatgggccaccaggtccatagaacatcctgcaaaacggagatgaaagatgaaatatggacgaacattttgcagctagagctagtgatttgcaatggtcataggtagtgccatgatccaagaaaagaaagtttcgatcgaatttttacggtacccaagaaatgaaggaagcctacctgctctgcgtgacatcgtagatttggcccttgatggccatgagcagcggcttgttggggtcggacccgtcgtagaccctcagctcctcctccgtcacctccccgagctgcaccggtggcggcagcggctgcgacgccctcgcctcctcctgtctcctaggcagcggcggcggccgccgcgtgaggagaccggacaccgcgacgtacagcgcggcggccaccgccacggccgtgaagaacgccgcgggagacagccccgtgtacgccgcgatggtggcctcccaccactccgccgcagcgaccatctccgtggacggcggtgcaatgcaagaaccgagagcccgagccggcaagggggagcagagcagagggaaggccggaagagatagcaagcagcctcgccgcgtgcgcgtgtgcttgtgcgcagtggtggcaactgggcactcgtagtacggagtcagtggcaagcagagcaggtgggagacgggacgcgcgaactgtaccgctttcggatggtgtttggatggtgcggcggagatggacggctcgcctcgacacggcacggcggggcgaggcgaccctctagaaaccaacctgtgcagcgcctgcgcctgcgcctgcgtcgtggtgtcagccacgcccacacgcacggactttgcttgctggatgtgacgctggtcggtgtggttgaggcgacggcaaaggcgacatgtaggaaaggaaatgcactgtacgctcaacgcactgtgaacgcccattgctattgcaaacgcactgtgaacgccctgggaaaacgtcgtcagatgacggtggcagggtcggcatcggagatggatggacggcaaacagcgctcctgtcggtcgccttttaccatccgtacccagaaaatgacgaaagataaggtgctctgattcagacatgtgaaatgtgagatgctggggaactggtctgcagtcaaaatcacgttgatggatactcctactcctatgtcgattgggcctcgaaatcgtgtgtgtaatttgctccaataaatccgtgtagccacgggcttcgaaccggcgacggcgctatggactttggagtggcgccgcgggctacttatcagtttctgatgcaaacaattttcagattaagatataatgcaatgtacgctcaacaaggttctgattgccgttggcatttcattttcccaggcatcctgattcatgaaagaaagtgagctgaatactactgttgtactagaagagaggcaaaagtgagctgaacggaaaatggcgccgcgacgtagccaacactagcagcaatccgcacgattgtgggctggaagcccggaacgtcctacgcccgctccgcactatcttcatgatctatctgggaataaatttacttccctgatcatcactgagtctgaaattcgtccataaaccgtaataccatatatgacgcatccctcaacttttaaaaccagtacaaataaaattctaagatggtttgaatggtgatttcagatgacatggtgcttacatgatgttgacgtggtacttaaagctgtaaaaaaacatgggacctgcaagtaactattcaattaaaatagaaaaaaaacaatgagacccacgtctcctccccaatcaagcggccaccgccggatgtcctcttggaaggacggcacgacgggcagtggctagcggggaaaagtgacggagcgtggcgaacgacgggagaggagctagaagaggacgtagatggcggcgacggatgagtgctcaacagcagaagcagctggtagtagtttgctactccctctcgtcccaaaatataacaacttcttcataaacattctctttccaaccaatcacaacgctccaccattcacttttcccacctacctccactactcctgcaatcacaacccttcaccattcacttctacctactttcttaataattgtgtccaactctaaaacttcttatattctaggacggaaggagtagattagatgctagctatcacctgtgttgcagtagcacaagcacaagagatcctctggtaaacccaaccaagctcaagttcttcttgtcttgtctatgagagtgtttcgaccagggttcattaaaccgttttggatggggttaccgtcacccccacgatcgtttgatagttattaggaaaaccgtgcagttattgtgaggtatactgtggttttaaaaactaaaaagattactacgcgtgttaaccgtgataattgcacgattttgtaaaccttgatgtcgacctagatactcctagtgaattcattcatgcaggcggttggccaccactgttatggacttgacagggaagtgaatgcatgttgctgctgcctgcatgcctacctttgggaaaagaaagctagtgcccgccgtgtcagagttaggtctcaccaaaccgttttaggtggggttaccgccaccccacggtttggcagttatagcggtaacagcgcggttatcttgaaaaccgtgcagttacgcgaggtatatcatgatttttgttaccgtacatgataaccatgattgacggagcgtggggctcctcaccgggagaccgcgctggcccccctttgcagattcggccggggaccctgggtgagactctaagctcccaatctgtatgtgaaaggttcgcgagaccggaagcacagaagacaccggcgatgtatacaggttcgggccgctgagaagcgtaatgccctactcctgtgttttttgggagatctgtgtatgaaagagctacaaagtatcagccagcctctcccttgttctcggcccctaatctggaaaaagtccagtccaagaaaaaaccccctctcaaatctatctcctctccccgtgggcaaggtcctccttttatctctcaagggaatcccacatgcaccatcccccctttttactggggacttaccctaccttttcatacatggacggagatttgcatggttgccgtccgagtctccttctgatgggacggcccacaactacctccactttcgccgggagcaggcgcgacgcggaatcatggcggtctgctggcgacatgaccggtgtcagaatggtcacaaatcggtcattcttgtccaccacgcgtcagcttagcaatctgcacgctggccctccttcacaccacattttgcctgtaatggttaggatgaagcctggcatatatctggtcgggactaacgtgccatctctgggaggtaacacgctagctccagctggggtcgagcgcctagaagccctcgtcctgacgggatggggcgaggcgtgcgtcagaccgcctgccgccacctaatcccgcgatctgaccggtctgtgactggtcacagaccggataaatgagtgcaatgcactacgttacatgcgtcgtgacacgctcaaccaaaccgcaataaatgtggttaggtgagccccactgtgctcacctaccccatacacgcggagcgaaaacccatgaggggtcggggcgcctcgaccctcggggccgaggggggtgcagcccgacccccctcgggggggctaagaggagggcgaacacaccaccttcgggcccgacgtcccccaagggtgccaggccacgtgggcgattgtgtctgcctcaaacctctagtcatgatactcccgatcccatgtcaccgacaatgataaccacacagttttgtaaatcatggttggagttggtcgtggcccagggatatcgtccttgtttccgatccgtgaagggagagcaatggttcccgtcggccgtcaccctgtgaagagagaagaagataggggagaggggagaggggggagagaggagaaagaaaatgctagccactgacatgtggggttcgcatgggtcccacgatgactccgtttgccatgtcaactgacaccgggcataatactacataagacctcaagtaatccggctttgtaaattgagagatttgttatatttggtattttggtttaggacgaatttcaaactcaggtcctgtttaattcccacacaaaaattttacaccctgtcacatcgaacgtttgaacacctgcatgaagtattaaatataagctaaaaaataactaattgcacagattatggttaatttgcgagatgaaacttttaaacctaattgctccatgatttgacaatgtggtgctacagtaaacatttgctaatggcggattaattaggcttaataaattcgtctcgctgtttattgacgtattctgtaactagtttttttattagtgcccgaacaccctatgtgacactctatataatacccgatgtgacacgccaaaactttacacccctagacctaaacacccccctcagcgataaactgaaggacctaaagcgaacttattccatctctcttcccacaagattggtttcagcacaccttagcccagttcccaaggcaagcccgatagcccatcatccattagtttcagactttcaggctttcagcgtcgcgggtcgtgctttcgtcttgtcgaaacatgaattcggcaataataaaacggggtagcgcacgagacctaaaagtggatggatgtggagacaaaggatttagacaggttcaggccctctcaatgagaggtaataccctactcctgtttggggaattgaatccgccgggtgtattatagatctgacgatctagttgtctcatgccccctagagggcctcctgcccaccttatataggatggggggcaggattacaagatagaaaccttaaccaatacggtatcggtttcctaaatctactttacaatattatcaaaccaggactttaggctgttccgtaatatataaggaaacgtaatacccaagtcatgatctgttacatattccatatatataagttatcccctataactagtcggataaccatgccgtgtggatatggggtacccataatctccacagtagcccctgagaccttcacagtcgaaaagataatcttctctcgaaccagattactccaaagccgagtacttcaatcatctttgccatggtctcccgagtacttttaccaaatctgaagactgtggagggctggaaaataaagtcaggtgcaccgactagatgcacctaataggtgtagcccccgacaatgtggttaattgaacaaaccaagcatatagtcaaggaataaataattcaaccaaccgagtggttttgataatcgtaatcaaccaagtgacttgatatcaatatatagcatatgcgatgtgaatcctccaaataacatgatccgagtgatataccaactgctttgtaaaatatgatgagtgatatagaaaaatagctataaagaagcttgtatattgtgaataaagaaatttccaaagtattgggcatacgccatgcgcacactgctttaacagatgtgcttaagtccctagaagacacatggtttcaccacacctggaaatatatggcatatgtggtgtaaaatccgagtaaataaactcataaaggatttaccaaccgcctagaaaatgaccacaatatataatcagcctaagccataatattggtcaataaaaatgcacacttacgtggcgaaaagcaatgatattgtatccaatcaattgcttaaaaacccaaacagcaccttgacttatatataaaaaagtcagcgggacagctatataaagctttactgtttgacaccttttaagatgcattgtaccaactcctaaaaagttaagtaactgcggtataaaaggattttaaggtattgggcacttgatcacgcgcactttggcctaagcaaaaagtgcctaagtccctaaaagaacgtgacaggccacacctgaaaatatgggttgcagacatattaggcctaggccaaaaaatatgccttcgacaccctttaaaggatgacgcatgtaacatgctcccgagtaataaatcttctgggtaatatagaccaagtgtagctcatatgaatagcttctgatctgaatgattatcccttatgggatactccaaaataaatataataattgaatcccgactggcgcaagtattcggttgatagcccttacggggaataataattggtccagtctttgagcatagaaaatagactcatgactatgaatccatgtggaatgtatccggaacaagtccaaattggagatataatcctcacgcttgagttgatgagcccctgagcatatagcttgtccttctgtcatagtcaaaattgtctattggcaatagctgacgcagtcggcatggagatgaaatgaccaacatgaagacgaaattgctcatcagaagtaacggaagatgtcagtggtagtaaaaacagtgacaccaatcaaaggtaatgaagttgcataaccatggaggcgaagaaaccagtcggcaacagtcaggtcagctagcagtgaagatgtaggcgcccaacaacaacgaaagaacagtcggtgatgacaaaagcaaaccgacgatgaagacgtagacgcgcatcaacagtgatggcgaaatccaccaatcatgaagatgaagaaaataatcggcggcgacaaacgcatccaacggtaatgatgattaacggcaacagagatagccgactatgatgacgaagtttcccatcaacggcagcagagttggctatgttgatgaggcttgacaagatgttgatgaagatgacgatgtcggtgatccagtcaatagcgatgtagcagccgatgataacgatgagatcctctatcggcagttgcgtagtaggccaaccgtgaagacaaataattggaggagagttgatgttgttgcccaactcgtctaaaccgaaatatttgaagttgttgaagtagaatgtctgttccgaagcaaagatgaagataatgactcctggagttgactcattggctgattaattgatttcttcagcttgacataaaatttgtcaaattttgagccttatatttgtgtagcccccgactctttggttagttgagaaacaactgaacatagagtcgagaattatagcttcttgtcgtcgagtagtcattgcttgattgaagatatgtgttgaaggtgtccaagtagaaatcctgaatattggagagtcacttgttgtagtaaaatatcatggcattgcatgccgagatgtcgaggttcacaaagacgtcgtggttggtgaagtagtaaaacttgcgaagtagcagcaatagagtttgccggtgccgaagataataaagatgaagtcgctccaccatgatgacaaatttgtattgccgtaatgaagtgaacacaagtcggcggcaacagaagcaaaccggtagtgaagacgcgtagttgtgaagataaaagcaccaatcggcggcagcataatcagtcggcgacggaagatgatgatgtccatcagtagtggtagctgtataaaccagacgtagaggtaagggcactagtcagcagcagacgagacgaccgacgatgaagatatagatgcccaacaacagcggcataataggccaatcaacactggcagaatcatgcagccatggaagtgaagaaaccagtcggcagccatggcaaacgtaggcagcttgtgttgaagatactgatgcctattagtagtgacagcgatgtagccagccgtgaagaagatagcatcagttggcgttataacaggccagccgtgctagcggtgacatcagtcagtggcggatgcggcggccggccggtgaagacgtagacgcccaacaacggcagcataataggccagccgtgcaggcggaaacaccagtcggcggcggtcgaggtggccggtcggtgacgacgtagacgcccaacaacggcggcataataggccagccgtgcaagcggaagcaccagtcggcggcggacgaggcggccggtcggtgaagacgtagacgcccaacaacggcggcataaaggccagccgtgcaggcggaaacaccagtcggcggcggcgaaggcaagccggtcggtgaagacgtagacgcccaacaacggcggcataataggccagccgtgcaggcggaagcaccagtcggcggcggacgaggcggccggtcggtgaagacgtagacgcccaacaacggcggcataataggccagccgtgcaggcggaagcaccagtcggcggcggacgaggcggccggtcggtgaagacgtagacgcccaacaacggcggcataaaggccagccgtgcaggcggaaacaccagtcggcggcggcgaaggcaagccggtcggtgaagacgtagacgcccaacaacggcggcataaaggccagccgtgcaggcggaaacaccagtcggcggcggcgaaggcaagccggtcggtgaagacgtagactgtcacgcccagaaattcccgaatagaattccaagcagaatgtgcattaaaatccccgtccaggaccagccggggtacacaaacgacaatgttgacattcagatccacgtcttacaaacatcataaaagtcttacaaaaatgcagcggaaacaaaagaaactggagctaagccttgactaaactgcagcgggaacaccactccacaggcatcctcgactgcacggacgaagcctactcctcggggaaaccttcatctgacacatacccgtcctctggggttgggaaaagtagagcaagactgagtactacccactgtactcagcaagtcataccggaataggggtatgatgcagggaattaacaaagaagagctagagtggttcatttgcataaatactggcatttataaacaggaatttaatgcgaaaacagttgtaataattaagcagtattaaacatccgctgtccaacgctaacccacgttgcgacaggcccaaccatccacctaaactatccaaattcatcagattacactagggtgagactaatcacggtgaatctggttgaccgcccataaccgcgggcacggctattcgaatagttttactctgatcagaggtgtacaactgtacccacaagacacagccccacgacacgtttccgtgcgccggcatgccaccacgacataccggaaagaggccgtgacaggacccttcgcataaccccctctagccaagcacaccacacctcaggtttcacccccgtccccagcgggcaacgggcagtcccctctcgtgcctaggtgaatccggaagcgacagaggccgtcgcagggcccgccccgctccatcacgcccacccttgcctggatgcgtcgactagaggaaagctacactacaagcccagccgttgcccacgctggcttgtggtaagtacgataaattcttccagggcatcccgcgaaccggtccttaactgccatggtgcgaccagcaaaaccatgcacccacagcccaccatgtgattcattttaattaaccaacaccggagcggtggtattgatccaacattaccattagaaccaacagtctaatcattgatatgattttccccattgtgaactagttgaactaagcatggctaagcaattcctagtccaaactctaatcatgttataacccaagctaacaaaggagcatggtatcaaaatagcatggctgtaacaataggtaaccatcccatattaatattgcaaaaccaatgcggtatttgaaagaaaacattaggacatttgcaatataggatcaatatgatcaagtgacaagcatgacttgccttgctctgctgctggagggacctcggcgactatctcgaagtacaccggagcgtcggaagaaccggaatctagcgacatacaaagcaaacattgcaaacaggctataagactactgaaacagggaacaaaaccatttttaatggattctacacatttttcttgatttactgagacttgaatgggattaaacggagctcggatgaattagttatgaattttagaagattcactgtgtttattactataaaagaaaaaccttaaacaatttattgcgcaatattaaccagggctgacgtcagcacgggggagtgcggcgccgacaagcggggcccaccggtcagcgacacgggagagagagaaaggggcggcggctcgcgggcccactgtcagcggcacgggagatggaaggggcggcggcgccacgtggcagccggaccgacggccccgatctacccaagggtagatcggacggcggtgggagctcacggccggggcacgcgggcacggcgcaagccgaaccggcgaccatggcgccggcggcgcagcgctcacgcggcggcggtgcgcatgcggcagcggcgcaaggcgacggccgacggcgaccgaccggcggcggagagcggcggctagaggaggagcggcggctacgcagctaggcggcgacgcggcggctaaacggtgcgggagagagaaaacgaggaggagggcctcaccgacaacggtcgacgacggcgggcgacggaggacgatggcgacggcggaacgagctccggagcctcctaacgaacaaaaggagaggggttagagagagagagaagagtgcgagagggcgagggcgccggccgaaggcggcggccatggcgtcactcaccggcacacgacggggatgggtctccggcggcgaacctcaaaggggaaggggcggccgaggtagatctcgaccccgcgaatctaacggcggcgacggcgcaagacggcggcgagcctagcggcggctagcggcggccgaagtagcaaaaacggcggcggcgggtggttgcaaggcgcggggacgattgggagctcgggaggggtcggcgaaatggggaaaaagagagagggggcgccggcgatgcttaaatagggggagagggggccggacgtggccgggagcggcggtattcgccggccgacgcgggggagtggggaggagagagaggcgggattcggttttcgaatcccggccatctcgggcgcgggcgcgagcgggagagagaggggaatgggcgcggagggcgcggcgcacgcgcggacgtggccgacgtggcccgaggaaggcggagacgtgggcgcggcggcggtttcgggcgcggcggcgcgccgggatcggcgggaggagggagacgggaccgacaggtgggccccacctgtcggcgaccccgagagaggaggcggcgggcggcctgggctgccggactgggcctcggcctgcggccggcccaacaaagaggagggggaggaaaagggaaatgggccggcggcccattcggaaaaaaaaggaaaaagggagggaaaagaaaaagaaaaaggaaaaaagattttccctggaattaacaatattgcttgctcaattttaattggttaaaattatttctagagctctgaaaattccactaaaaatcctgttaatgaattttgacatgtagaacttaagaaaaattccacatgtcgagtccgattattatttgcattactttcttagggttttctcctgatttcacctgcattttcttggggtcatttgtaaattcaatttttggcttgggaggaaaacttcggggtgtgacaaacctaccccccttaaacggaatctcggccccgagattcggaggagctggtgaagaggtgcggatgggcggctttcaactcatcttccctttcccaggttgcttcctcttctgaatgatgactccactgaactcggcaaaacttagtaaccttgtttctggttctcctttcgctggtatcaagtatgcgaaccggcttctccacatatgttaggtcctcctggatatcaatgtgttccgaatcagcctgttcttcaggtacccttaaacacttctttaattgggacacgtggaacacgtcatggatgccgatcatattggatggaagttctaactgataagcaacttctccccttcgttccaaaattttgtatggtcccacgaagcgtggtgccaacttgcctttcgtctgaaaacggtgtactccccggagcggagtgacacgaagatacacgtaatctcctgcctcaaaagtgagctcccttcgacggttatccgcgtagctcttctgtcgagactgagcaatcctcaacctttccctgatgattctgactttctcttctgcttccgttaatacttctgttccgaacagttgacgttcgcctgtctgatcccagaagagaggtgtgcggcactttcggccgtataaagcttcaaacggtgccatctgtagactggcctggtagctgttgttgtacgagaattacgcatatggcaagcttttgtcccaagctccaccaaaatcaagagcgcaggctctcaacatatcctccaagatttgattgactcgctcggtctgaccatcagtttgcgggtgatatgccgtgctgaaatttaaacgggtccccaattcttcctgcaatttctgccaaaactttgaggtgaactgactacctcggtcggatactatcttcctgggtaccccatgcaaacacatgatccttgcgaggtacaattctgccagtctctttcccgtataggtggtatgtactggtataaagtgagccaccttggtgagtcgatccacgactacccagattgaatcgtgacccgatgatgtccggggcagtcctgttataaagtccattccaatctcctcccatttccattccgggatttgaagaggttggagtaaacctgctggtctttggtgctctgctttcactcgttggcaaacatcgcagagtgcgacgaattcagctatttcccttctcatgctgacccaccaaaatttttctttaatgtcttggtacattttggtgctgcctgggtgaatggagtactgggtctgatgagcctcggtgagtatcagatccttcagttccttgtcgtcaggtacacacaatctttctcccatccagatcgtgccatgctcatcctcgtggaaatcccgagcctttccgactctcatattctttttcagctctgctatctcagaatcatttacttgagctgctctgacttgatccacgagagtaggccgtgcctccagagcggctacgaacccgtgttcaacaattcccacgttgagatgctcaaactcctgccgcaattcctcacacatgccctcgatgcatagggcagtgcagtaacttttccggcttaatgcgtctgccaccacattggctttacccgggtggtagtgaatactcatgtcatagtctttgattagttccaaccatcttcgttgtcgaaggtttaggtccggttgggtgaagatgtatttcagactcttatggtccgtatatacttcgcagcggtttccaatcagatagtgcctccagatcttcaaagcatgaaccactgctgccaattccaagtcatgagttggataatttccttcgtgtggacgcaactgccgcgaggcatacgcaaccactctgccctcttgcattaggacacatccaagtccgtgacgggatgcatcacaatagacttggaagtctttcgtcgggtcgggcagaatcaatactggtgcggatactaacttcttcttgagctcctcaaaactcttatcgcactcagctgtccatttaaacttctcatctttcttaagcaactgagtcatgggtcgggcgatcctggagaaattttcgatgaatcggcggtaataacctgccagtcctagaaaactccgaatctgcgacacggtcttaggtggggtccatttggtaactgactccacgttcgatgggtcgactgccacaccctgagccgtaatgacatgacccagaaatttcacttccgtcaaccagaagtcacacttgctgaatttggcgtatagctggtgctccttcaacttttcgagtaccagacggagatgttgctcatgttcttcctcggattttgagtagataagaatgtcgtcgatgaacaccacaacaaacttgtccaaaaattccatgaacactttgttcatcaggttcatgaagaatgcgggtgcgttggtaagtccgaaagacataaccgtgcactcatatagcccgtaccgagtggtgaaggccgtcttcggaatatcctcttcccagattctcaactggtggtagcctgatcgcaggtctatcttagaaaacactctagctcctttcagttgatcgaacaaatcatcgatccgcggtaaaggatatttattcttgattgtgacctcgttaagtgcgcgataatcgacgcacatcctcttcgtcttatcctttttctccacaaaaatgaccggagcgccccaaggtgaagtgcttggtcgtatgtaccctttctgcagctgctcatcaacttgcttcttgacctctgctacttcgttggccgccatcctgtatggtctcttgtaaattggagcggttcccggtgccaagtcaatccggaattcaatctctctcttgggtggcatggtagtgaggtcttcggggaacacttctggatactcgcagactatgggtatatcttccaacttccgcaagttcttctctacggtgtccactgggatttccgtctcaatctgattcaacgagacccctttctttggtgagactagagatttgtacaccacggtttctcccttctcgttggtcaaggtgactgtgcgactcgcacaatcgatgactcccttaaacttggtcagccaatccatcccaagaatgacatctaggtctttggattcgagaagaatgaggttggctagaaatggtgacctttgaatttctattgttatagaagggctgaattgaaccgaagtggagctattccctggggtatgaacccgcatcggtgtgctaagttcctctcttattaacccatgcatcccgacaaatttctttgagatgaaagaatgcgttgcaccagaatcaaaaagtactgttgcagggattgagttaacaggaaacgtacccagtacgacctctggtgctgcttgtgcctcctccgcagatgcgtggttgacacgagcctggataaaccttggtccggcacgcctgggcttcgggcatttgtcagcgaagtggccaagctcgccacagttgaagcaggaccctggttttgctcccgtctccttcttggcttgtgcgggctggcctgactgtgccggtgccatcggtgggcgtggagctgtaccgcggttgggctgacctccatggtggttctgactgccactggtgccctggtggaagttgctagggttgaacgggcggtgctggcggacgatcatggtggtaggtccaccctgctgtccgggagtgaggcgcggcctctggtgacttccctgaggtgccctgaactgagcggccttcctcttcctgtccatcttgttgcgttggtcctcctgacggattgccttgtcgaccagcctctcaaagtcagcgtagtccccagatatcagttggttggtcagctcatcatccagacccgccatgaacttctcctgcttctcggcgtcggtgcggacatcctctggtgcatatcgcgcgaggcgattgaactcatggaggtactctgtcacagtcctgttgccctgatggagcgcacggaattccctcttcttttgtgccacgaccccatctggcacctgtgccttcctgaagctacggcagaactctgcccatgtgacttcagtacccggtgggcgggtggccatgtggttgtcccaccaagctgacgcaggaccctgaagctggtgtgtggcaaaagcgaccttctcctgatcattgcactgcaggagattcagcttcttctctattgcatggagccagtcgttcgcctccatggggttggtggtgctggagaaggtgggtggcctgacgcgtagaaattctggcaacttggactgagggggagggggaccaaactgctggtgctgctgctcggcgtgctgcatcatcctttggtgcatctgctggtgctgctgctgcatctgctgcatcatggctgccatcatctgagtctgatgtgccataacttgggcaagcgtcggattctcgggaagtggtggcggaccattgccagaatcactgttggggtgcacaccatcagcgcgttcttcaccgttgctgccctcgcctgtcgtgcggttgccagtcctggtgtagaccatctggagggaagagcagacggggaaaagaagaaaaacagatgctcaagaactaagctttattataaaggaattaaaactgcaattgttctgatctgaattaaaaacacttaaaagagcaagcaaacatccttattaagacagccatatcataggcacatgatatcgaccgtcaactgaccccaaacaagcaacctaaacacacaaactaacaactagaaactagacaatcgataaactaatgggaaaacgagcctaatgctcggaacggctcctgcggtcggtggagtcgaaggcgtcctcctgctcgtcaccaggtccctctgagcgactcctggagcctgacagatcagtctcgccgctgccactgggagtagcagacaaccaacctccggtaccactggctggtcctctggcggctgatgctggagcgaaggagagagtgaacgcgggagctggagctggagctggagctggagctggaggaactgccggagctgctgctgctggaggtgggttcctgggcgcaagctggatgcgcacgggtgcagtcgtcctcttacggggcgtagtgcggatccggactcctcctggtgctggaagacccttcaactgagcattctccttcttcaggcgcgctatctcgtccttcagagcgacgatcctcatgagcttcccatcattcaaggccttggtcgccttgtgcaggtccgagtgcatccggtccaatcccctcatcacagcacacatgtgaccgaaggtggtgtcgttctcgccagctgtcggacggaaggagctgacgccatcaccatgggctcgacgggggtggtagcggtacgccgtgtcgtggaagatgtagtcgtggcgctcccgtaacctggccatcatcaagtaggctgcctcctgacaggcatgatctgctgtgcctcctgacgcctcaaccgccatgttagcgaggcaagtccccacgtagccatggacctccaagcggacacggtgaggaagctcgccactgagcggtgggatggtcgtgtactctggcgcgttggggtagcccaccaccagtgtcatgcgtgccagctctgccacgaagtcgatcatgccttctccgcggtggttgggtgggtgaccggccatctagagaagacaaaggagtaggatcaatgcatgctcaaatccaaatttaaataaagcaataaaagactcaaataagagaatcgaatagaagcgaaattttatgcatatatcattttgcatgagagcgaataaataagacatactcacataacgacaaaataatgagaaattagatacatattaataataacaaacgaagcataaacaccttgcaacccatgttatagagctaggacctaatgcatttcacccatcaaaccccaactgactgacgaataaatcccaataattttaccaaaactctagactgacttgttttgaaaaaatctcacttaaaccagcgacaagatttttccctcgaaccacaacagcagatcccaattttcccggaacaaatccaattgcaaagaacatatgcaatgaaaaaggattcagagggctcttaggtttttccatttggctcgtcctacggtcaaggtcggctctgataccaacttgtcacgcccagaaattcccgaatagaattccaagcaaaatgtgcattaaaatccccgtccaggaccagccggggtacacaaacgacaatgttgacattcagatccacgtcttacaaacatcataaaagtcttacaaaaatgcagcggaaacaaaagaaactggagctaagccttgactaaactgcagcgggaacaccactccacaggcatcctcgacggcacggacgaagcctactcctcggggaaaccttcatctgacacatacccgtcctctggggttgggaaaagtagagcaagactgagtactacccactgtactcagcaagtcataccggaataggggtatgatgcagggaattaacaaagaagagctagagtggttcatttgcataaatactggcatttataaacaggaatttaatgcgaaaacagttgtaataattaagcagtattaaacatccgctgtccaacgctaacccacgttgcgacaggcccaaccatccacctaaactatccaaattcatcagattacactagggtgagactaatcacggtgaatctggttgaccgcccataaccgcgggcacggctattcgaatagttttactctgatcagaggtgtacaactgtacccacaagacacagccccacgacacgtttccgtgcgccggcatgccaccacgacataccggaaagaggccgtgacaggacccttcgcataaccccctctagccaagcacaccacacctcaggtttcacccccgtccccagcgggcaacgggcagtcccctctcgtgcctaggtgaatccggaagcgacagaggccgtcgcagggcccgccccgctccatcacgcccacccttgcctggatgcgtcgactagaggaaagctacactacaagcccagccgttgcccacgctggcttgtggtaagtacgataaattcttccagggcatcccgcgaaccggtccttaactgccatgggtgcgaccagcaaaaccatgcacccacagcccaccatgtgattcattttaattaaccaacaccggagcggtggtattgatccaacattaccattagaaccaacagtctaatcattgatatgattttccccattgtgaactagttgaactaagcatggctaagcaattcctagtccaaactctaatcatgttataacccaagctaacaaaggagcatggtatcaaaatagcatggctgtaacaataggtaaccatcccatagtaatattgcaaaaccaatgcggtatttgaaagaaaacattaggacatttgcaatataggatcaatatgatcaagtgacaagcatgacttgccttgctctgctgctggagggacctcggcgactatctcgaagtacaccggagcgtcggaagaaccggaatctagcgacatacaaagcaaacattgcaaacaggctataagactactgaaacagggaacaaaaccatttttaatggattctacacatttttcttgatttactgagacttgaatgggattaaacggagctcggatgaattagttatgaattttagaagattcactgtgtttattactataaaagaaaaaccttaaaaaatttattgcgcaatattaaccagggctgacgtcagcacgggggagtgcggcgccgacaagcggggcccaccggtcagcgacacgggagagagagaaaggggcggcggctcgcgggcccactgtcagcggcacgggagatggaaagggcggcggcgccacgtggcagccggaccgacggccccgatctacccaagggtagatcggacggcggtgggagctcgcggccggggcacgcgggcacggcgcaagccgaaccggcgaccatggcgccggcggcgcagcgctcacgcggcggcggtgcgcatgcggcagcggcgcaaggcgacggccgacggcgaccgaccggcggcggagagcggcggctagaggaggagcggcggctacgcagctaggcggcgacgcggcggctaaacggtgcgggagagagaaaacgaggaggagggcctcaccgacaacggtcgacgacggcgggcgacggaggacgatggcgacggcggaacgagctccggagcctcctaacgaacaaaaggagaggggttagagagagagagaagagtgcgagagggcgagggcgccggccgaaggcggcggccatggcgtcactcaccggcacacgacggggatgggtctccggcggcgaacctcaaaggggaaggggcggccgaggtagatctcgaccccgcgaatctaacggcggcgacggcgcaagacggcggcgagcctagcggcggctagcggcggccgaagtagcaaaaacggcggcggcgggtggttgcaaggcgcggggacgattgggagctcgggaggggtcggcgaaatggggaaaaagagagagggggcgccggcgatgcttaaatagggggagagggggccggacgtggccgggagcggcgggattcgccggccgacgcgggggagtggggaggagagagaggcgggattcggttttcgaatcccggccatctcgggcgcgggcgcgagcgggagagagaggggaatgggcgcggagggcgcggcgcacgcgcggacgtggccgacgtggcccgaggaaggcggagacgtgggcgcggcggcggtttcgggcgcggcggcgcgccgggatcggcgggaggagggagacgggaccgacaggtgggccccacctgtcggcgaccccgagagaggaggcggcgggcggcctgggctgccggactgggcctcggcctgcggccggcccagcaaagaggagggggaggaaaagggaaatgggccggcggcccattcggaaaaaaaatgaaaaagggagggaaaagaaaaagaaaaaggaaaaaagattttccctggaattaacaatattgcttgctcaattttaattggttaaaattatttctagagctctgaaaattccactaaaaatcctgttaatgaattttgacatgtagaacttaagaaaaattccacatgtcgagtccgattattatttgcattactttcttagggttttctcctgatttcacctgcattttcttggggtcatttgtaaattcaatttttggcttgggaggaaaacttcggggtgtgacatagacgcccaacaatggcggcataaaggccagccgtgcaggcggaaacaccagtcggcagcggcgaaggcaagccagtcggtgaagacgtagacgcccaacaacggcggcataaaggccagccgtgcaggcggaagcaccagtcggcggcggacgaggcggccggtcggtgaagacgtagacgcccaacaacggcggcataaaggccagccgtgcaggcggaagcaccagtcggcggcggacgaggcggccggtcggtgaagacgtagacgcccaacaacggcggcataaaggccagccgtgcaggcggaaacaccagtcggcggcggcgaaggcaagccggtcggtgaagacgtagacgcccaacaacggcggcataataggccagccgtgcaggcggaagcaccagtcggcggcggacgaggcggccggtcggtgaagacgtagacgcccaacaacggcggcataataggccagccgtgcaggcggaagcaccagtcggcggcggacgaggcggccggtcggtgaagacgtagacgcccaacaacggcggcataaaggccagccgtgcaggcggaaacaccagtcggcggcggcgaaggcaagccggtcggtgaagacgtagacgcccaacaacggcggcataaaggccagccgtgcaggcggaaacaccagtcggcagcggcgaaggcaagccagtcggtgaagacgtagacgcccaacaacggcggcataaaggccagccatgcaggcggaagcaccagtcggcggcggacgaggcggccggtcggtgaagacgtagacgcccaacaacggcggcataaaggccagccgtgcaggcggaaacaccagtcggcggcggcgaagtcaagccggtcggtgaagacgtagacgcccaacaatggcggcataaaggccagccgtgcaggcggaaacaccagtcggcagcggcgaaggcaagccagtcggtgatgttctgactgatccattcctggagcgtaagagataagcctaaagccatgaatcccttttatgcatatctggatctggatcctgcagaacaaacatataggatgagtagtatctgatataaatataatactcgagaaaaaatcaagtattttaaaatatttataaacatgtatttctcctcttgtcaattttgatttccccgagcagatgactcattacgtttaaacgctctgcccaactagtcgggtacttttgcaattattaagagcagaaaataaatttatctcatctctatgcttttgatttattccgaataatacttagcaccttgcgttactcggtccatccaacgagcccccgggtgctaggaatcggcccaaaggcaaccatccattggcaaaccaaacggaaagcataggaagatagaactccataactcgataggtacttttgtactcagattatgtcgcaagcaatcaagataaatattataaaaaatatgatataacatctgtagcccccgactcactactcaatggaagaccaattggtgtagtgaggcagaggaaaaggaaaaatatcatataaagaataaaataaatgatgacttagctttgtaatattccccttggtgatggcagaagtggccaatgtgggaacaaagtcgtccatcaataacaatgaagacaccagtcggcggcgacgaaggcggtcgacggtgaaagcgaagatgcccactaatggcggcataataggtcagccgtgtaagcggaaacaccagtcgacggcagcgaaggtgagccaacggtgaggatgtagacatccaacaacggcggcataataggccagccgtgtaggcggaggcaccactcggcggcgacggaggcaagccggcggtgaagtcgtagacgcccaacagcggcggcataataggccagccgtgtaggcggaggcaccaatcggcggcgacggaggcaggccggtggtgaagtcgtagacgcccaacagcggcggcataataggccagccgtgtaggcggaggcactactcggcggcgacggaggcaggccggcggtgaagtcgtagacgcccaacagcggcggcataataggccagccgtgtaggcggaggcaccactcggcggcgacggaggcaggccggcggtgaagtcgtagacgcccaacagcggcggcataataggccagccgtgtaggcggaggcaccactcggcggcgacggaggcaggccggcggtgaagtcgtagacgcccaacagcggcggcataataggccagccgtgtaggcggaggcaccaatcggcggtgaagtcgtagacgcccaacagcggcggcataataggccagccgtgtaggcgaggacaccagtcggcggcgacggaggcaggccggcggtgaagtcgtagacgcccaacagcggcggcataataggccagccgtgtaggcggaggcaccactcggcggcgacggaggcaggccggcggtgaagtcgtagacgcccaacagcggcggcataataggccagccgtgtaggcggaggcaccactcggcggcgacggaggcaggccggcggtgtagatgacgatgcccatcaacggtggtgtgaccaaccgaccgtataggcggggacaccagtcggcggcgacggaggcaggccggcggtgtagatgacgatgcccatcaacggtggtgtgaccaaccgaccgtataggcggggacaccagtcggcggcgacggaggcaggccggtggtgaagtcgtagacgcccaacagcggcggcataataggccagccgtgcaggcggaaacaccagtcggcggcggcgaaggccagccggtcggtgaagacatggacgcccatgaacggtggtgtgaccgaccaaccgtataggcgatgacaccagtcggcggcgacggaggcaggccggcggtgaagtcgttgttgctatcagcaatggcggtggcgaggacaagccggcggagtggactcgcggccgatcgaccggaaagctgagacgcctcgagtccatgaccagcatcaatcgcctcaatagtgccgcgtagttatatgcgaacaacaacaaaaaatagcaagaaattaatctgagattaaaaatcaatatgataaataatgataaaaatcagattgagtttccccctgactgatttggatcaagtcagagaagaggagcttgaagaagtggtcgacggaaaggaagtgaaaactcccaaagcgaaagcgaagtcggcgactcatgaaattgattccatcgcgctcgttgataggaaactcgacgcaacccctacctggcgcgccaactgtcgaaacatgaattcggcaataataaaacggggtagcgcacgagacctaaaagtggatggatgtggagacaaaggatttagacaggttcaggccctctcaatgagaggtaataccctactcctgtttggggaattgaatccgccgggtgtattatagatctgacgatctagttgtctcatgccccctagagggcctcctgcccaccttatataggatggggggcaggattacaagatagaaaccttaaccaatacggtatcggtttcctaaatctactttacaatattatcaaaccaggactttaggctgttccgtaatatataaggaaacgtaatacccaagtcatgatctgttacatattccatatatataagttatcccctataactagtcggataaccatgccgtgtgggtatggggtacccataatctccacacgtctcgtattctcaagcgacgtcacactcacagtcatgcatactccagctctataactatttgcattaagctatttctttgtaaacgttcttgtgttccagatgtaccatgaaattaccatatatatcatagaaatttcaagacaagtccactcatgtcattttcatatagataatccgatatttatagaagatgtcgctaccaaaattagaattgatcagcattttaattcggcaagatacctttagttttcattgaagaaattactatatagtactccgtaactaatagagcacaaagtacaagtcaaacgtgatgtgctgcatacttgcatgtgcaaggaagaagttcaacacaatgtcgtgctcacgctgcataccggtaactagtcaagaaaactatttgataatgctgcttatgaagcaccgtatattcacattctatttttctgattacatgtacgcccacttattaatattcattcaaaatgatagaagcgaacggtaaattttaaccccactaaaatcctactgaaaacacacgtgtatgtttaggacgtgactagatgccgggtgtctaatctagtgcaaaaaattggatgtttaaaatgttgtggctcaccaacatcaagttatacattgttaaaataaaattttagtcatataaatatttgaaagatatgtgaaacacaataacatatatgttgaatatttttctagaaaaatataattatataatatcttaaatatttaattacaatgaatacaatgatgtaaactaattatagaccgaataagtaagttaacgaagatttcatgcatgcagaaggggctggcctggtgagctttgcgcaaatagaacaggaggtgcggcatgcatgttgtgcacattcggtccaaaaaaaatgtgcacgcacatgcagcagcgaaccccactagaaacattttccgcgtctttaatatcctcggtaccattatttaaaaacctaatgaataaagtcatgtacctataactctctcaccatggtgttcagaagtaatgatcaatcgtatttataatcgaatccgagagatgcatttaataatacagtacatagttggacgaacactatctttgaactggagataagtctcttttaaataaacactaccttgataagcaaacaataaataactactaatatggactctgcctacatatatgtttgaaaattcacaatcatttagttgacatgtgataaacaagtgaacgtccacacgagagattagaatcatctcccaagtcttacctaaacttttgcatggtaaattgcatcagagtaatctacgatatttccttttcaccgagtaatctatcactatggtcaaatcctatagcgaagagactaaaaccttgtggtcatctcgctcgaggaatgtcagagatattaccagctaccgacgacgcaacagagcatgagttgcccatctgattttgcatcaaggccagcatgttacagcttaggtgagcttgtgatagctctgggagtggcatggcaccgtctagcaactgcacgacttgccgtatgcccggacgagcactgggcagaggatgtgaacaaagcaagcatagtttcagcaccaggcttgcttcttccacggcaaagtcgccttgcagccgtgggtccacagcgtcagtgaccgtcccttgccgccaatgctccagcaccatgtccaccaacaagagttgaccgccgttcgtgtcttgcaagacaggccgccgtccgcaggtaacctctagcatgaacacaccgaaggcgaagatgtcggacgccttcgatggcctgccggtgtgccctagctcgggggctaggtaccctattgtgccaaccacgtgtgtggtgtgtgggtcggtgccacgatcatataaccttgcaaggccaaagtcacctagccgacagttcatttcggcgtccaacaatacgttgcttgccttgatgtctcgatgcagaacgacttgttcccaatcctcatggagatacaatatgctcgatgcgatgcctttgatgattctaaacctttgagcccaactcaagattttgctgttctcagcatacagatacttatcaagactaccatttggcatataatcatagactaacagtagctcacccttctgccgacaatatccaagcaactgcacaaggttccggtgtcgaagttgaccaatgctaaccacctcggcaatgaactccttcattccctgcctcgactcgtgagataccttcttcactgcaatctccactcgggataccagtagtactcccttgtacacccttccaaatcctccaaagccaagcaatcgctcatcggagaaaccattcgtggcacggaacagatccttgtatgagaaccggtgtggcccaaacgcaacctcccactcctctttaagctccgcatacctgcgtcgtctccggtgaatcacaagaacagcaatggccaatgccgacaccagtgcggccgaggctatgggcaatagtatcttcagaacgttggacggagccctggcgatcgtgacaggcaacgccggcagctttgatacgtttagcgatggtgctggcccgtccatcttgaagctccaggcaagcacgtagtggcggctcgcgacgacgccggtggacgaggagaagccgacgtaggcttcgtcttcgatcacggccgagaggttcacggcggcggagagcagcggcgtcgtcggcttgggcagctcgaggggagccatggtgacgttgacgagcgaggtgcgcgcgtcgaagtccacccacacccgcgccgccgcgcggctgagcaggctcatgttcacgaacgcgccggtgcggtcgtcgtggtagcccgcgtcgtcggcggcggcggacgcgaggccgtccacgtcgatcccgacgtggttgtcgctcatgtcgccgaactcggcgttgacgatggtgtccagctccacggcgaggaagtggttgctggcgttgccgttgttgcgcgcgttggccaggcccatgtactggctctgcagcgccgacgagaagtcgcggctcttggcgacgacgaacgccaggccggggctgctcaggtcggcgtactcgctgacgatgccgaacacgaacgccgtcgagaaggaccgcacggtggaggatccgccgccgctcgtcgcctcgtgaaagaaacgcaggggagaagggtagaaggcgtggcctttcagcagagtcgtgccgttcgtcagcatgaggaggccgcccggcgtgaccacggccgtgccgtcgagtgtgaggttcacgccggcgaagccgtcgaaggtgaactggtcatcaacggcggctgcggcgaggtggaaactcccaaggcttaggaagagaattagaggaagggaccgcatgattagctcgggacgccgcatggcgtttgcgccaaacttgcttctgttgttaaatctctacattctaataagaattaaacagcttttaggttgtcagtattatctgaagatgtcaagatcgacgagtacgatttagttgaaaatatgacgcattaggatgatttggttgcaattttccaaaaaagaaaaaaaggatagaagacatactgttttatttcaacacgcgtagtcttcaatataaaacttcggagtattgtactatattctcaatgtgtactgttgagtagtggtattctgcgtcatgacaaaatttctcaaattaattacattacatcattttggtacaaccattttgtcaagaaccagccaaaaatgacgtactatacctgtcatctacaactaataattacataaatatacactgatgaactgaacaatgtactgtaggaatgatcacggtttcatggagccataaaaaaatcacagttatcgatgtatgataaatcccggaagatcaagttcagttgaacagtctacttttcttttctttttttgcgggtagaacaatccctacttgatattatccttaatagtatactttatgttaaacctcatcaatctcagatataattacatactctttttttgcgggagtactaatgattgactttttgtcaaacttgcgtgccaattttggccagagcaagaaacgcgtgtaggatattgaatactcacatttgattccagtggacttaggaaatatactgaatagtatggatattttggcttgcgaggtcaacatagatttttctgctaggcactgtacagcttatcacatgcaatgatagtacgacgcaatcaattaatccagtgattttatctagagctttggtctatactctaatttaggtgaaaaattaaaaaaaaagccacatgtagatgagaagatgttacacaaccatgtagaaaattttatccaaactcgtcttcatttgtgagatatgaaaataacaaatttcaaaccaatatattatcatcggtcaaatatttgattgacacatttgttggcaacagctttcttgtcctgttctttaattgccattcacaaacacacacacacacacacacacacacacacatttttgaaaaaaaacaaactaatgactttttaatcgtcgcggtaagctagtaaaattaattaaaataaaacagaacgatttgaattggtacaatatccattagatggctattccaagataagaagttctagaagcaacacagccaacaaaaaccttggtacttcccaaagagatgctccggtaagcagtttcgtatatgagatacaaaacaaagtaggattcgatgaattcgatgatgcctaagtgacacaattataatttagtaatccaatcagttactgaaacctagtgcagcatggcacttcttatagttcgtcagacatttatcagggttcacggttcactgcacgtttcaccagtagcgatggaaaccaggtaacatctagttttatgtacctattcaaattgaaataaaacgagtttttgttgcatacagcatactcacaataaattcctaatcgcttaatcagtaatgcttgaagcatatgcatacttgactgccgtgcatatgttacctcagggttgcagtggtcaccggaggcaacagaggagtggggttagagatatgcaggcaactcgcgagtaatggcattcttgtcgtgctgactgcaagggatgaaaagaagggctctcaagctgtcaaggcactagagcagtctggtctttctggtgtgatctttcatcaattggatgtgactgatcgatcgagcattatgctgttagtggagtttataaggaccaaatttggaaagttcaacattttggtgagtagactgatatatgcagttcagcggtttcaaacggaacgtacgtagttattagttacagataagttcagttttgctcaagatttttggaattctcaggtgaacaatgcagccattggaggaacaaccatcgatcctgaaagattacgtgaactcttagagcaggatcccaaggcaagttttcaagtagctattttcttttcacttttgaacaagagagcaccaaagcaaccctttggaaagtttcttagattttgaaaatctatactcctttaaaagaagaaaatggtggtggcagtgaatctgccacccaccaactctgttgtattttttaccaactattctttcatgtactttaattttataaaacagtacttctacatattgttaatatcttatttcatctctagaatttaagtttacaatgcaaagacatccacaaggaatcagggatgatattgttccaaaaaccttaaattaacttgttccaaacaatgttagcacatgtataatttatttttatccgtagcaaagcacgggtatttaactagtgtacataatatgatatagccactgattataactgagataaattttgtactgctatctctgtataggaagatctaatgggttttctgaatagttatatgggaagcttgcaacaaaattatgagatggccaaggaatgtctggaaataaatttctatggcacaaaggatgttacagattgcctgatgccactcctccttctatccaattcaggaaaagtgataaatcttacctcaaaaatttcacaactccaggtaaccttatccatgaaagaattatatcgaattacttttcttctgataacataaccgtgagaatatctgcatatgtagtttgaaaacaacaaaacagggataacctagttctgccaaaaatattatcacaaggcacctaatcaggagaataataagctaaagtgatttagccatttttggtagaaacaacctttgaacagatgaattgcaatatgcaaaatcatgttctgcaatgaaactttatcatgcaatgagttgaattgtttgattcttttccacagttcatctcgaatgagggggtcataaaggtgctaagtgacattgataacctgtcggatgagaagctcaaggatgtggccagcattttcttgaaagatttcaaggatggaaatctagaagcacatggctggcaaccagtggtatcagcatatgcagtgtccaaaacgttggtcaatgcctacagtaggctccttgctaaaaggcacccatcgctggaagtatgctgcgtcaatccaggtttcgtgaagactgacatgaactatggcattggattaatttcagtagaggaaggagcaaatgcgccagtcagattggctttgcaggaagcgtgcagtgactcgtgcctttactttgagcaatgtgaaatttctgaattttgacaagatctgaactctaggaagtacgagggttctgctttgagattttccaaataaactggagcacaaagttagagtttttaattagtactggtatttagatctgccttgtgctattccaaataattagatgtggtccatgtggaggacaacttattgaaacccaaacaatatcaactcaacattgagagagatgtttggaagtttggaaatcagaacgggaccttcattgtaggttcctgaagatcctgataatccaaacaatatcagctcaacattgagagagatgtttggaagtttggaaattggaatagaaccttcattgtaggttcctgatcctgatatcccaaagataagctaagacaggctagttagccaatcaatatgatgcttgtgagttgtaccttacttaataaagttttagacctcttgtgcttctgtatctgtgcttctctaaatgaacacctaatcttaatggtaatttggtaacctggcaatcacatgcatattcacatatagggaacgtcaacacacaaataattaatactcttacggctggggtctctgaactaagcaattgaccagaaagcccaatgcgtaatactagtttcactagattcataaagctcgctaaccaggcttaccccaaatcacaacctttaacctagaactgaccagagtgctgaatcctatccccattgttcccaaatccagagatggcggactcgccaaggatcaaaggggagctgacctcactggagccggaaagccgttggccgcacactctcgcagcggtgcttccgggcgaccgcgccggccactggccgccgtggcggtggcgccgtcgcggcgcaggtctcgtggccaacggccgcagggggacaatactttcaacagcctcttcggcggattcgccgtttcgtgggccgtaccgtagccatgtgtcctctttaggccgaaattacgtacaatcgagttcggtgtcccgaggcccatgggcctccgcgaaacccgagtcttgaattggaatcgtaaatatactcttaaaccgaattagatcatgaaccatccaagctagccctaaaaacctcaacaccggggagccgcgtcggcacacgaaaccaacactcgtgcggccgtgcagttccaatctccgcgcctagcgaacatggacaacgccgctgccgtcgccaccttcatggagatcacctcctgcggatcccaggaggccgccgtgcagcacctcgcctcctgcaggtgggacctcgacgccgccctcaaccgctacttcatcttcggcggcgtgttggccgccgctcccgctcccgctccggtcgccgacgtcgcgccgcccgctgcgctggatgacggggtgcgcgctcccatccccgcccgctccgacacgctgtacggcgacatgtacggcggcgccaggcgccgtgaccgtgattcccgtcccgccccgtccgtttgggaggacgagccgccggcggtgacaccctcggtggcgccggtgtatatacagatgccatctgcgaatcccgcggtggcgccggtgcaaatacagatgccatctgagacggcggcctcggtgcccgctgcgccggtgcccgtacacgctccatctcagccccccgtggttgcaatcgccgtcaagaaagaacaaaacgagaaagacgaggaggaagacaacggccgcgacgacgacgacgacggctacagcgacagcgactacggcatggacacggacgacgacgacgaccgctacgacgagtgcatagagaaaacgccatctccaccacccaagtcgacgcagcaacaggcgacgacgctcgccgagatgtaccgccgcccgcgcgagctcatgcacgacgcggacttccacagcaccaaggtgcacgcggcgcgtcaggaccggtggctgctgctcaacctgcagtccgccggcgagtttgcgtcgcagatgcacaaccgggacctgtgggccgaccaggtgatcgcccgggtcgtgagagagagcttcgtcttctcgctgctcgagaacagttacggcgacgatgacgacgaggccagcaaagtttgctgcttctacaagctccatgaccagcttcccgccgtgctcgtcatcgaccccatcaccgggcagatgctggccaagtggagcggcgtcatccagcccgaaaccttcctggtggacatcgaagaatacagcaaatcgaagccgagcatgcgttccaaaccctatatattccaaagaaagcccatgccggtaaggtcagcacctgcagccagcgagcagcatcatcaagaaccggcaatggttgacactgctgcgcctatggatatccacaatgttcaagaaccagacactgctgcgcctgcacctgcacctgtggtcgaacacggtgttcaacaacctgcgactgccggcgccggcgcacagcaaccagcagatgaacaagatgatgatgaccagccgatggaaggtgagaagatgtacaggatgagggtacgattccccgatggctctgtggtcaccaaagagttcggctgcaagcggagggtggcagtgctcttcaattactgcagatcggtgctccatgacaagccgcaggcgttcaagatcaagaggttgctcggcgtcggcggagctttccacgagttgccccaaggtgaccactcgtttgaagatttgggcctgaactgcgcgactgtctcagtaattttggatacttagaacgaattactcctcctactactactatatggttcattggtccttgtatcagattctcggattcatcactatggagtagttgttaaatttagtgattgcttttgcttcattctaattatatatgcttaacgctactccgctagtgcgtggcctaattctctgcttgaagttcagaagtcttataaagtctccggatgcagtaatgcacggattacgtactgtacgctgaaccagtaaaaaccttttatgtctgttgagttgtgatccaaattccgttgcacttaataaagactagcttacgaatcgtcatcccttttagggttacatcatatatatacctcttgtaagccgccgtgtgacgttgtaacctcaccctagatatagtgaatatattttgctggctggcgtccgtggttttttctctcttgttttgggagggttttctacgttaaatctcgtgtcttctgcgattgatctattgttttgtatcgtttatttgtctatcgtttcctaacaatgtcatctgcggaacaagcccggcactaacaaaaccacgctctgtttctattttttaagataatgaaaatgaattacatcttcggcttctatcataagacacacagctataagtttaatattaatagccataagtttaatagtaataaaataaaataaagataaaaataaatcaatttgagaaataagatgatcggacaaatcccaaccttttatgcccacactttgtctcggacgtccgatcctgtgactcgcgtcgggcgcggacctccattcatctctttatccactttacctgtgttcttagccactcattccctcctctctctctctctctctatctctctctctctcttcaacacagtaacgaactctccagtctccaccacgcgtgcgaggaagcacagttgaactcaagcaagacgaagtcgttgtcgctggccgctggccgctgggggagtagatgacgtcgccatcggagcaaccactgtcggagaagacttcgagctcgccgccggcagcggcaacaccgcgagaaaatgcggtcgacgccggttaggccttgagctcgccggtggcagcggcgccacaacaaggaacaaccgttatcaaagaggacccgagctcggcggcggcggtggcgtcaacgtcacaaggagataccgctagcgccggttagggcccagagctcggcggcggcggcacttggagggagcgggttgaagcttgaggcgccgttgatggagatggctgtgagctcgccgacgaattaaggtgaggatggtgggagcatcgagctagcaaggatttgttccatgctagtttctttatgttgcacacaagtgtttcttgatgttgcattttggtattccttgatgttgcaattcatatttctggatgttgcatttggtacttgatgttgcaggtgatttctttagatgttgcatatgtttttgctcttgaagtctgtgttttttagtgtttcatccgactgaaacattttcagtaaaataatgaaacattctttcataaaggatggaacatcaaagaaacaactcacgttggaacattttttctggaacggggaaacatttgcaacaacttatggtgaaacattttatttggaacagtgaaacattgcaacatctcttttaacatctagtgaaacattgcaacatctctttaatatatagtggaacaccgtccagagatttgtaaaactccggacgtccgatgtgtagtcatctccttttatgccatctgcaaaacaagcccggcactaacaaaaccacgccttgtttctattttttaagataatggaaatagattacatcttcggcttttatcctaaaacacacagctataagtttaatagtaataaaaaaaagttaagataaaagtaaatcaaaataagaaataaggtgatcggacaaatctcatgctcctctttattatttctttattattaactagcgttaaaccatatagttttttttctagcaattctaatggaactacgtcactcatagtgaaaatataatggaagggatggtgattttacatgagacttcatgagttgcacaagaaaaatatggatggggttattttcaaaattggttgtacacattcattcgtggcgatcaatcttgccacgatcgaggattactacgactctctgtgctatcactttatgtcaccatctaaactcaacagtaaaccagagcatgtggctaccatccatcccccgacccatcatacaggtacagccgtatagcaacctcttcacctctgtttcttgcacatgcgcaattccgccgttttttcttgcactagaacctgcactgcgtgtaagagctctcctacacgatgggaccaggaagcaacaactccttcccggccgagaaaaggtacacacaacttggctatgcaccgccctttcatgcaagatttcagttggttgtgctgacgaccagctagctgtttgatcggtttctcctgttgcagggttgcagtggtgacaggagggaacaaaggacttgggctcgagatatgcaagcagctggctgccaatggagtcaccgtcgtcttgacagcgaggagcgaggagaggggcgccggagcagcggccgcgcttcgtcagctcgggctatcggaggtcctgttccatcagtttgatgtgtctgagccttccagcgccgctggcttggctgattttataaagcacaagtttggcaagcttgacatattggtatgtgcttttaaatatgttttgttatatagtccttaaggagatactatgagataccaatttttatattgtaaatttggtatcacttagtatctaggtactatgaggtaccaaatagtacaatttggtacttcatagtaccttctcaaagatcgtaaaattgctcaaatttttggtacctccttaaggacggtaaaatttctcatacggtaaagttttcaagctttgaccataatgaaaaaataatttatatttatcgattttacggttctagagaggtatcaaaaggtaacacatttgacactttgattttacactagtaaatgtggcactttcaagtacctatgttcaataaaatttctcttgattaaatcatccatttacaagatattgcctcgttaattctacctatcatacccttaactattgatgattcataggtcaacaatgcaggaattttgggggttacatttgattttggcaacttagatcttaataaagcggtgagtatatcacgagacgacctatattgtggatcaagagtactgtgtgctgcgaagttaagtatgtttcgtgcaacagattgagggcaagagtgcaaacgagacgctggaatggttgatgcaacacaccgtggagactgccgagaatgcagaagaatgcttgaaaataaactatcacggcaacaaaaaaaccatacaagcactccttcctctcctccaatcatcacctgatggaagaattgtaactgtttcctctgtttttggacaactatcggtatgtacatatgcacacattttagttataaatattcgatgtgtagaaaatgattcagtgagttaaaatttcaacatcgaatttaactagaattagcttataaaatccaataaatttatgatattatgatgtagtttttgagacaaatctacatgtactatttttttaaaaaaaactaagcatttgagaaattattgacagttaaaatttaaaaaagataagaaaatcttattctaaacaatggtggactgaacacatcaaagcagcttgctgttctcttaaaactaatctagtttcgatctgctccagtttttcagtggggagaaactcaaagaggagctcaacgatttcagcaagctaagcgaggagaggatagacgagctggcagagctgttcgtcagggacttcaaggacggagagctggagtcccggggatggccagccagagccgacgcgttcgcggcctacaagacgtccaaggcgctgcagcacgcttacacgagggtcctcgcgaggaagcacgcctcctcctcctcctcgccgttgcgcgtcaactgcgtgcatcctgggtacgtcaagacggacatgaccctcggcaccggggagctgacggtggaggaaggcgcggctggccctgtcgcactggccctgtcgccgccgggaggcgccacgggcgtgttcttcatccaaaccgaaccagcgtccttcgtctgagcgtgattcctccggaaaatcagacgcagcttgtttctcatatctaggggtgggcattcggtctaatcgagaaattcggttcggttcctcggtcttctgaaaaattcggtcttcccaaccacaagaccgatcggtcttaaaaaaactcaagaccgagcatttcgatcttcggttagttcggttcggtctcggtcatagaccgaactagccatagcagcagtttaaacagcaaaaagaattaataaaaaaaaactccatacaagatcaatgaatcgaagcaactcggatgaagaactacaatatgatgccactagagcatgattcagaaaaaacaagaagcaaatcaaagcaaatcgatctccacaattccacctcaagctccagatcccgtcgatctcccaccatcgctttcatccccgaccgacctcctcagccatctaggtctccagcgcaggtgaaagggcggcgccgaggcggaggcgtcctggctggaggcggcaccgaggcagaggcggcggccgcggcgagatgggtcggagggcggaggcggcgccgacgcagtgggtggaggctggaggcggagggcggaggcgacaccggcgcctgcgcggtggaggctggaggccgagggcggaagtggcgcggtggagacggagccgcggaggccgagcggaggtgagcgcgaacgtgcgatgaatggggaggaatgcggtgctgactcatgaggagggagggtggggcgtgacgcgtgggggcaggcagtgagagagagggtggaattagggtttatgttactaggcttattgggcctcctaagtttattgggccacaattcggttatctcggttaattcggttaaccgagcccaatgaccgaaatacccgaaataaattcggtcttttgatggctgaaaccgaactactaaccgaatttctcggtctccgtcttttcggttcggtctaaatatgcccacccctactcatatcaataagacaatgagcacctttacggtggtcttcaactctccgtaataacggtattattatcgattataagtggtcccaccgtcccaagggttaatttataagttctacttcaagtagaaaaatggtttttctactgtcaatagttaagtagtactataaagaagattgtaaattctatcaaactataaagctaagctaacgtccattaacttctaaaactcaatatgcaaatatgtgacatcattacctcttagcaataattattatttagagtattttaaatatcatgcaaatatgatatattatttacaattttattatatttttagaatttaatatgcaagcaatgtccaatcattatctccacatcatttcacattatttaaatatatacatctatcatttctattataatacgcgttaatccatatataccgcaatgaagcgcatggtatcaactagtactataaatagttactataaatcattgcaaaatacctctaattaagacaactagcatggtggcccccgcagattgcgcggctagtatcattatattttctctcatataatacatatatgttttctcaatatattattcaaatatattaaaatgacaacataattttaaattttgcaataactttatgaaactactaatgtataatattcatgttgcattttatatacgtattagttattaattatttttaatatcaaattttagttatttgtaaattatatatattcctatatagactctagactcatcttttaatatttcttttttttaattccgaattttctgtaaattgtatttctatatagactctaggctcttcttccaatattatttatttttatttctgattttttattatttcaaattgtatttctatgcggactctaaactcatctttcaatattctttaatttttaatttcgaattttagttacttctaaattgtatttctatattgactttaaactcttcttcccatgtttttcttaatctcgaattttagttatttgtaaattgaatttttatatgaattctaaactctacttttaattttattatgtttattccgaactatagttagttttaaattcctatatgaactctatactctacttctaatattcattattttttaatttcgaatttctatttttttcttaattgtatttctatattgactctatattctacttctaatattccttatttttaattctgaatttctattatttcctaattgtatttctatatggatatggactctataatctacttctaatattcctttttttaattccgaatgtcaactatttctaaattgtatttctatatggactctagtctcctcttctaatatttcttattttttaattccgaatttcagttatttctaaattgtatttctatatggactctgccttttctttttcttcgattaatgtgagaatttttagaccatgagagcgaacgtggagacttctttttatatttattccgaactatagttagttttaaattcctatatggactctatactctacttctaatattacttattttttaatttcgaatttctatttttttttcttaattatatttctatatggactctgtactctacttctaatattccttatttttaattccgaatttctattatttcctaattgtatttttatatggatatggactctataatctacttctaatattcctttttttttttaattccgaatgtcaactatttctaaattgtatttctatatggactctagtctcctcttctaatatcccttattttttaattctgaatttcagctatttctaaattgtatttctatatggactctgtcttttctttttcttcgattaatgtgagaatttctagaccatgaaagcgaacatggagacttttttttctattcctttaataatataatagataattgaacaatgtgttggggcaaacaaaagaagattgcaatgaacagattcttgccaatgtgccaatgtcatggctccatagcctcatacagaaataagtacaacagttgcagtttgtcaaagaaatgataagcaagttttcggtctttaagaggtggaacaaaaagaaagaaagaggaagcaagggaggataatacatcaaattactagctgataattgaggatttttcttatgtctatatatatatatatatatatatatatatatatatatatatatatatatatatatatatatatatatatatatatatatatatatatatatatatatatatccggttctgttttccccctaatctttgctctatgtcgcgtcttgtgggggcacttcctgttctttctcgctggcctctgtggccgccaccggtgcagcctcctcggactctttctgcttcgattgtgcggtctggatcaagtggttgtagctgcccttctccttgaacagctgcgagaaatggatcttgcagtagaggatcccgttgagcgccgcgtaggaagacgtcgtcaggatgcagcccccatgcgagcacttgaagcaactcttgtggtaagactcaccctccagagttagctgaacaaaaaaatagattccatcaaatcagattggtttagagcaggtacaatagcagactataagccagctataaacatattttaaagagataaaaaatgagagataagagtagcgggctacaaatttgttgccagttgtagcacatacgtaagaatacatgtgtgtatgacaggtagaaccagacattaattatgtagtacatgtttatgggtaactattgtatgaattagctattaaattgactatagatgatttgtagccaatagttagctatactattaaacttgctcttatactcgttcaatttcaatgctatcatctttttaaattttctttaacggttttgacagattgaaatttgtgtgacgctactttgcggtcgtaactaggcagcattctgtaccttctccaatgggtacacagttttttggcaggctgcacatttatcttgagttccagagaatgctgaagatagcttgctaggagctcttccctggaaaaagtttttgcagagtgaatagtttgcggattatcaaatttggtgatatataactaataaatgcataatgtgtgaattgggctataaacaggtctgtggggtttgtacctggtcgctcttctctgaagatttaccacctgagtaccgggacagagagagaattcagaacacaataacttctcaataatgtccaaacatctcgacagccactgtgtcttagcattaccttgcgagaatttctttgagaagctccccgtctctttgaagagctgctcaaagtgcgtcttgcagtacaggacaccatccatcgaagagtagttacacatctgcagatgcgtaaatgttttgaacgaaaaatgtgatagttgatttaattacctaataaaaactgaacatgttgcagggccgatcgatgccatatatacataccgagagggtccccttgcagtggctgcacttgaagcatgtcttgtggtaggagacgccgtcggcggtgaggaggtcgatgaaatggacggtcttgtcgcacgccttgcacttgtcctgcgtgccggtgaacgacatggcggccggggtacgtatactagcaccgggtgattcaccgatcggtcgatggaaaaccttcaggcctcggtctggtccagctcgaggaatcaccgtagctatagcttcccaactcccaactcttccgatcgatcgacggaggagatcgattcagggcgagacgagaggaacgtgggcgtggcgtctccagagaagggagggaggagagatgggcagacagcaacgggcgatggtttaaagggcggggcggcgtgagcacgggagcaaagataggagacgggatgggctccgggccacacagatgacagacggacgaacccggtcgtgcaaaccgggagagaggcttgtttaattttgggaggggcgagcggacaagaattttctatgcctattctatgcctaggtgtcatggcatccatcatttgcatgtgatttaaatagttatagaaaaaattaaaacaatcaattatgatgatacaagtctatacacaatcatacaagaactgaactagagaaacaaaaataataatatcagacagtgaatagtacccgtacaacgcagataaaatttgttatttttatttcttcatatgtagattgattttagacttacatgtttgtatagtatcttatattatcgcagtctatcttatctaattttataatatttttataaaattatttaaactacatgcatacacctagacgccatgatatttgggtatagaaaatattttcccaggccttcacacgggggcgcgcgctcatgtcgcgcgcgctcaactccggctgtggtccttcttcaggtcgtgcgagccgcgaaatcacaacgtggctccatggatctctgcgagacactgtcgtgcggggcagttcgttcttgattatgcagatctctttctggttgggtttgtgtactgggcttcgatccgctctgctcacgacagtctgggtggacaagcgtacatatctgtcacagataggcccgtataggcccatgaccgaataaaggaataagtccattatacctctctcaattattcccctttgtcgaattacatccctcaaccacaaaaccaggtatattacctcctctaagtgttaaaaccagtacaaaacaactcccttaatggtttctgacggtggttttgctgacgtggcatcctagtcatcgaaaaaaaaaattaaaaaaatacgtgagggcccacatgtaagtggcatttctactcttcctctcctccaccactctcctctctcctcccccttctctctccctggacaggggaggcgccggaggcgcggaagatgtggggaccgccggaggatgcgagcgcacgccgcgagggagaggatccactatcagcagcagcagatgcaggtggtggcggcggtgacggggaataggaggatgcaggggctagggccgaagcggagctcgaacaaggaccggcacaccaaggtggatggccggggacgacggattcggatgccggcgttgtgcgccgcctggatcttccagctaacgcgggagctcgaccacaagtccaacagcgagaccgtccagtggctgctccagcaggtggagccggcaatcgtcaccgccatggggacgggtgtcggcactgacatacaggggccctccctcccttccccaaactgcgccctctccaggtcgcaccaccaccaccaccacatgtgggctgccgccgcggcaccgcccgccgcgtccgcggcgttcgccggtgccacatcgggttcgcgaccatgtttgccggctacgtggcggcggccatgccggggctagaactaggactctcacaggacggccacatcggcgtgctctccgcccggtcgctcagccagttctaccaccaggtcggcgacgctagtgccgccggtcaactgtcgcacccacaccaccatcaccaacaccatcagcaatagcaggaggacggggaggatgaccgcgatgacggcgagtccgatgaggagtccgggcagtagtaggcgcaccgccaattgttcatctatgcgtctcacgttgtctctttggagaagaaaaagagaattccaggaaggggcatgcagctaatggagggggtatgcttttgttactgttgggttgttcttcatggggatttttatgtctgatttttcctcgtgtggtgtcgaagctggaagaggctactacttgctccagcgacttgttgggatggatcatgatcatcttcagttgttactcctgctgctccatggatggtcgccggtttatccccctccaagtgtttaggtgaaagctcaatctttttcactccacagtcagcacatgacatgctctttgaaaggtagcttgatgagcttatgtattttgccggaggttggcggcgcgaatagacagcgggaggatgcgttgccggcgagcagatcgacgctgtggcaggtgaaccctccccgtgcgggcgccgcggccggcgatcctctccctcgcggcgtgcacccgcatccttcggcggttcccacacctcccgcgcctccggcgcctctccttgccgtgctctgttcgaggagagagaaggggaagaagagaggagagtggtggagagaaatgccacttacatgtgggccctcacgtatttttttaatttttttcgatgactaggatgctacgtcagcaaaaccacagtcaaaaaccaccaagggagctgttctgtactggttttaacatttaggggaggtaatatacccggttttgtggttgagggatgtaattcgacaaagggcaagaattgagggaggcaaaatggacttattccccaaataaatatcaggccagatacactttaattgctttgtataagcgcaatgggctagagatatacacgggccataaaatgcacaatcacgtgctttgcttgcttatgcgaagaagaaaaggcacgtcaaccttttctttttctagatctttcatgaacatgtttttgaccgtgatacggattggtagatttgtctagagctattgtcttctttaaaagaaaaaaaacagcacagaccagtggcggaggacgagaaaaaaataaggtgtggcagcatcaacacagcgaaaacaacataatagggcgaacgctatggatttgtaatgtgctcccatgcaccgctaaaagttactgcaaaaattgttttgatgcaacaaatcattttttttgaccgagaaaactaccagggcttttcctagtagtgtattttcattaaaacaaaacgtatgtacaaagatatagggaaaaaggagcttttaaagagttacaaagtttgtatccaatcaagaactatttgttttcaaggctccttcattctacaaatatgcagaagaacttcgtttctgaataggcgtttccacgactgaaaggatggcacaacattctaaaatattagcccatttctctgtttccaaatatgccaagaagcgatgaaaaagatttcgagaaaaccttttcgagcaaaattcaatcttcctaagattatcatttgaaagaatcctatatgatgattccagttaattcccaagtgttgccaacacctaacactgaaaggacaagtgaagaagagatgaagtctggtttctctctggcctgcattgcataggacgcaagttaaatcatcattctcttttgcacaatgcctcctgtccggcatatcctagtgtttagcttgtcactgaaaagtagccatgcaaagaccttgattttcatgacacattttgtcttccatagctagacaagaggtctggggggctgcagtggcacaaagttgagcttgtataactttttttgcagtgtatgaagatgaattccaaataaagctccaactatcaccttgccctggctgcaagtgcaaaaggttaagttcttcttccagcagcaggaattcctcatagaccagggcagataaaggtagcaagaaagaatcctctaggggtcttgtactcatggccaacacagattcctctttatgaatcaccagacagtagagtgttggatacttgctgctcataagaccatcactccataaatcttcccaaaataaagctgaggttccagttataagagtgcatttaccaattcccctgaaaatatcagtgagggctaaaatgtccttcagccagaaagaacccttgttaagacacatgtgggggactcttgcaagatagtaaattttccatactaagtcaacccaaggcaaatcaactccattgtaaagtttaactaggtgtttcataagaagagcacaattctgaagcttcaggtttaccactctcaaaccccccttttcttttggcctgcaaactaagtcccatgaagccaaggatcttcttgtggagtttgggttatttccccctccaaagatagtttttccttgcattatcaatcgatttgatcactgtgacaggtagttgcaaggaacacatgaagtaagttgggatggctgacgggactgaatttatcaaagtgagacgccctccttgggggagaaacattgaacttgttgttaatcttctttccactctatccaccaaaggggcaaagtccacaatcttaggccttgttgtccccatgggcaaacccaaatatgtgaaaggcaaagatccaattgtgcagccaagtaaaccagccagatgattagctttttcagaagagacatttagggggtataagctagactttctgaaattgactttgagacctatggactaagcaaagttattcaaaagagctttgagatagaagatctctctttgtgaggcttttagcagaataagggtatcatcagcatattggattattggaaagcccttaccatcattttcattgttgggtttagagagaagaactaatgagaaagctttattaacaattctctacagcaattcagcacccaagacaaagagcaatggggacaaaggatcaccctgtctaacccctcttttgcagccaaaactattaccaggcactccattaagcagaacaacagagttggctgtggataaaatcatttggacccaattgattcactgtgctgggaaacccatattttgcataacggatattatggctgaatgctcaattgtgtcaaaggccttctcaaagtccaatttaagaattatgatttctctcttagattgctgacattgatgaatgtattcaaaggcccaggccaggcaatcctgaatggtccttcccttaaggaaaccatactgattctcactgatcacctttaaaataaccccttgtaatctgtcagccattagtttggtgagaaattttaagctaactcccatgagagagataggcctgaagtcattaacagtttcaggggaattcttcttaggcactaaagtgatgaaagagttgtttaaagactgtagatcagtacatcctaagtggaaatgtgcagccaatctataaaagtcttgggcaataatgtgccaacatcttttgaggaaaacaccattaaagccatctgggcctggggctttatctgcaggaataattctaatgagagtatccatttcctgagtgaagaaaggatccacagggttgtccagacaaacatgatcagggaaaagctcattcaaatcaaaccccattgtgggcgaattagagacacccattctttctctaaaacttttatagaacaaagctgctttctgctcatgcagggtgaccacctaaccatcatggtcctggatttgggagattgagttagctctatatatttatgtagcaatggactgaaagaactttgtgttttcttcacccagcaacatccatctattggtgcatctttttttccagtacattttcctgaactctaagagcttaattatgtggcactacacaatctccctgaaactcctctcttgtcagagacctggcctcctcaacaaggtctagaaaatcaactgctcgattgcaatttgcaagcagaacatttagtttagataaatttttgctccagcttaacaaccttttcctaagcattttaagcttaaaagagatgcattttgcagggtcctcaaagtcaggatccaaggcccaagcagaattgactatatcaaaaaagccctccacctctacccaatagttctcaaacctgaaaattggggaccttggaattttagtatcaatcttgaccacatagggcacatggtctaaaatgtttctagtcatgggtagcacagatgtattggggaagttcagtgtccaggaggcagaagtgaaaacccaatccagtctttcaaggagagggttttgttgcatgttactccaagtgtacctcctgcctttaagagggatttcaagaagacctaaggagctgataatatcattgaaaatgaagatgtcattcatatcaactccagccttattcgtgtcctccactgacctgtaaaagttaaaatctcccaagaaaagccaattctgctgactttctatgtgaacattctgcaaccaggcaacaaaatctgctcttgcagggccagtacaagaaccataaacacaggtgagagaccaaggctgtgaggattgtctggaggtgaagtcaacagtaaccgaaaattgattgacctcttttgccacccccatgaacaccttaggcaacaaatcatattgatatgtgttaggattcaaaattcccgaatgaaattttcaaaaaacatttttgtgaatttagcaaaatatatccaaatttgatcacattttgttcaaattttaaattatttttggaagatagaaattgccaaaccgatagattaaacctttatctcggttgtgttatataactactagcgcttatataggtagctaattacaagaagtaaaaacaagataatcggtataggttggtttgctttgtgtaactaactaacgacaaagtcagaccagctaatcacgcatgcatgcactttacctccagtgaagaagttaatccagctaatcacgcatggatgcactttttacaacgagtgaaaacaaggcaatcagtgaagaagtttatcatgcatgcatgctatttaccaccagctaacggaattgaggtatggcgagtgccatatctcgtcataccggaagctccgccactggcacaggccatgcacatcttatatagtgaaagcagcaagctttcttacacgagaatgtgccacatcatcaaaaacatattagccgtcggataaatagttcggataaataatagtcattggatcgaaagagtgcatgtattaaaaaaatcacaaatgggctaaacatatggaaatttccagaggtttcgagtatctattgtcctagcaagtatagatactttgtaaacaaattaacttatatcaaaaccttattaagagctaaggtaaactaatagaccatatataaaagttcttaaacaggaccaaaagttgcgcaaagcgtgactatatggctagttttattgaatatagtggaagaaaattgcattccctaaacaccaagggttaaagaaatccacaagtttgccatgtacagatatagctacgatcaagaagatgttttaccgctgcaagcgtccacatccttgtcttctcctttatatttgcaaaaggccaggtgttgaggtctttttgtgctcgaaggtttttggttccttactttctatatctcccacacgaccaacaggatgagcgtgcacatttctctcttgggcatgccttggtgacttgcgagcattttccaacactcaaacattgatctcggactccattggcttggtgtgacttgttgataaactacaattttgtaactagttcccaaattctcctaatgtatttgtattgaagaacaggtgagaggatgattcatttgcattgtgatagagatgaagtgagtgttgttcggtcaaacactgactaccagctgatctgatgtccacgctctattttgtatcaccagctaagtgaagagcttgcattttgttggcgcctaaggcttccaaatgagggcattgaagtttgtggtaactcagccaagacattgtgctttgtaaacggataaggacgtacattcaccgtggttggttagcttctacggctatgttcttatgtcaaggttcccaacctctactcattcgtttcccgcgcacacacttcccaaactactaaatggtatatttttattttaaaaaaaatctatagaaagatgctgtaaaaatcatactaatacatttttcaagtttttgttaactaatacttaattaagcatgtgctaataagtcgttctgtcttcctagattggttcccatccactggtgacgaacacaaccttatgcatgttggatcacattccataaggctactaggtccaggatggtttgcagatgaggtcttgtatccaggtcttattcttcaagtcttggtgcattgtcctttttttttctttagatgttacattcattggtcgcttatgttgattttggaggctacaacaaagagggttttgtttgtctcgtcacaaggcgtttccatgcccacccatggcttccaagattctacccatttgtgccacaaccatttaagccttagggatttgtaaatttctcgagatcgagcgtcctcaacccttcatttgccataggtaagtgtgttctctttcagtcgatcttgcatttggctccaatgaagtttccggagccaacccatatgaatcgctagcattgcttgccaatcttctccaacgacttcttgttgactgtaagagcagtgattacatctgaggtggtggcatttacatgcacaaatatagttttagacgatatttgtaacggaactctggctacaaggtacaaatgctcacttccctattaagtacttgggcatgccgcttgcgtcgagaaagttgtgcaagccacctttgaatggatggcggggcatctaggaggatggtaaggaaggaacatcgggttagcaggatgcacaacccacgtcaaatcaaagctttccttttttctttgcaaagaaaatgatatcttcaaagaacaagcccacaagagacttgtagtctactaagtctcgtcatgactaatttttttcctaaaaggcgacaattaatcttaaaaaaatgtgttatatatgccaacatcatgtcatatcatgatattcatgaggatgacaacgcaaacggctagctacatgagcgccacgccgtcacgtcaacctaatttagattttcatttttttttttgaattgatcgttgttaaactttgtaaagttatgcatgataaaaacgtcctaccattcggtaagaaaaattacgttgtgaagacaatacttacgtatttgtctttctagcagaccgacagattaatttcctgccaaagtaatagccctcgtgctaatagaagtatagaacttctgtaacttttggggaacttttgggtggtcaaaaaaaatgtgaaagaaagtcgttccaaagaattttagttactgttataactgaactttctaatactgccacttggccagtgactcggcgagaggtacataacacccagtttttttgtaagtattccatgttaatttggacgtcgacagatgcaaaaattattttgatatgacgtagaggaagcaagaccacagagaaattagatttatgtattacaacaaatcaccggcctcgacacaaattatttttcgccgtacttttaagtcgtgctcaacgactggctgcattatatgcacagttactttgggcccattaaattattaaaatgctttaatgtaaaattttgctgctaaaaatgcttagtctattcgttgcatcggtggaaaatgccctcaaaaccagaagataggacggtgatagataatattgatgtcttttctgtgtttgttaccctccatttgtagttctcgatgtcgttttattgagttgtgggacatttgtgtcttgtgccttacgtggaactgcatatgttcctgatgattgcatctgatgatctaataagtcctttggttttggtataagcagagtttcgctgtaaataattactcccttcgtcccactcactatgtcatgtacgtattttaaaatttaatttatatttgatcaatgaatattttattataagttaaatattatttgatgaaaataatatcattgattatcatttaaatttacttttatatgattatgattttgttgctacaaacattgtagtatagtaataaatttaaatttaaagattagttagaagattgtgccaaatttaaatgtatcttagtgagtgggacagagcgagcattgttttacaaatgttaaaaactacttaattctattcaaagagatttgctccggtccagcacaaagtatctcaaagtaccggtaactcacggtaccaaatcgttttcgatcattggatctagctgggcaggatgggcattgttagatccaatgatcagaaacgatttggtacggtgaggtattgatacctcgagatactttttattggaccggagcaaatatcttagagtggcattttccttttcaagcttcagactagtagtatttcacgaaattcctccttttcacataaagttagcgtttcttttataccgaaagcaaacttgaatttctcgggactattcggtggagtagtaccaaaatctccaggatgccctgagagcattacctattccaatctgcaaacagttgtacttcgttccaatctcaaattaaagtccattagtccaagcaattcatcagtacagaatacgagtataacagctctgttgacttccaagttcaacatgctcctcctccatcttgatctggtcctcctatcctgcattgtattgatacctgatcaagaatctatgggctttgctaaattgattgcctctatcccggctgtaccgccgtaccaactaggcaactatgtacaattcaaaaaggaaaaaagaaaagctatatatgcaaccatagaaattggagcatgatattattagtacttaggagtgtatatgaattcagttgttagtgactctaaatgggcagagtttctcccatttttcaaaaaatatcacttctggcattattgtccttgtaaataagtaagctattgtgctcgtgagtaaacgccaattggggggtgtttaggtaggctctgcatgagaaagtcttgaatgtcacgtagtagcggtcagtgtcatagttgttagtagttactgaccaacccagtactaggtacaaaatatgaacataacagatcagcacatgacgcgtctggatcatggagtttatgcacgtctgtctgtcttgagcccctgacttacaagaagagattgcctactggctactgcgataaccctgatttgtctacctttttgtatagtgagcaaaaataatctgatgagtcatgagtttctttcttcaaaaaatatctgatggacttaacattagcacttcttgcccacctttcacgaacactgacgtttcctgaagttgtgcagtggcttcggtttcgttctctcgtatggcccttgatcatagttactctgtcaaagcaagccggatgcgttacaacttgcaacactctgaacacaagaacaagaagtcagatcaaagaagaagaatctgctagtaccatgcatggaccaagctaaaggcatagagaaatgccatgtatgtttagtgtcctagacgattaaggcatcccatcgccacagataacgtagggtcgtcacacaggaagactgtcgccaataattgcatctgtcaatataaaattgctgggatatcatcggaacaagttgtgttaagccgccaaggctcgtgtatcgatcggtttcggagaagatcggaagaatgcatgtctgatttgagttgttgcacttctttcagtataatgcatgtggctcaattgtgtgattgcagtgatgatgtaagatacaagcacgtaactcttgaagtttggcggcttcctactctttgcgaactgcggctatcgatgacaatatgggctggtggtcaggcttgtacctgctgctgcaattagatgcagtaggccggagtaatcaatctgcagttcagtaacagtttgttactgtttacagaagcacgggggaattggaggttcaaatcaaacttgagcagcatcttagttttcgtcccatagggaacttgattaaaccataaaggctgcacaagggcacaattatctttttttaaaaaaacgatccggcactatacatgctaattttattgaatagagcaggactaaaaagttttgtacaaatataaaagaaaaatataaaaaaaaaagtaaaactaagtgataagctccgagagacgttctgctaaagttcaggtcttggtttcctcctccattttttgccacgagcactattgatggattttatgaatgttaaaatccattggtggagaactttttgatgaactgcattggcttattggtcagtacattaaaatcatcggatcaaatttcacactacaaagtggtagctactcaatcaccgtaaaattactcatgattcaacatgaatgtatcttgatcaattttatggtctgagaaggtaaaaaagatgccacatttgtagtacaaaatttgttaacaaaacttacactaaaaatttaatgtatctccctgtacctcccaaagtccataaattttttctatattttggttccgttttgaacttatttcatttacattatttgatggattattaccgtggattatctacttcattgtaggttatattaaatattttagaaaataaacacacaaatagcttaaaacaacctaaataatataatagcagaatttttttaagaaaaatatttttcgaagcgtggagaaaaatccgtttcaataatctaatgaataatcgaaaaaaagggccaccagaacactctgtccttgaattaggacatctaaaacgcaagagtgagaaaaggtcacagaaattgacactacctactaatgcaactgcataccataagttaatgatcacagtcaggaaacgactttagggagaccacatacgtatattttcttagcactagctagcataagcatatctttctgcagagtccaaaacccagtttgctaccctaacaaaatcccctcttgggggaaggattgtatttttaagaagcatggatctgtcttgtgcaatattaattggggtactagtactaaataaactccgtagagaaatgtcaaagaaaaaaaagtattgtgcaatactaaactccatagagaaatgcaacagaaagaaaaaaaaaaggaaatgattgtcaagcaatatgcattcacctactccacgaggtgattaagtttaagaaacagtcagcaaagccagcagcttagcctttcgtcgtttcccctgccctattcagccaaaatgcaaaagaaaatgctcccggctctcaaacttgagagttgagacaatatcaatcaatcaacaactacgcacatttttgcatggtgcattttgcgtccattttatcttgacgtggtcgtgatctcactacgactctagaaggagtacaaaaatacttgctcgttgtttgcatgcgtacacagcgaaagtcccctcctctctttgtagccgacagaagccagccgacattttgttccgtcaggctataccacttgtagtcagtagagtgatgttcagattgtgacagtgaataccaaatactgcacatgtctgtacaagtggcttgcgtgcttgatcgtataagggatttataattatataaatggagaggctaattcaagaaactagcccgtgaaaggacaaaacattacttcatgtattcccaataaaatactccatccgttcaaaaaaaaaaagcaaaccctggatttctgtgtccaactttgactgtccgtcttatatgaaatttttttataattcgtatttttattgttattagatgataaaacatgattaatactttgtgtgtgacttgtctttttaatttttttcataattttttcaaataagatggacggttaaacgtttggcacgaaaccagggtttatcttttttttttttgacggatggagtatgtgttcagtacaacaaaattctctgaacgtcactaaataggtttattttagttcatcccagttcataggctaaatatttgtacgtttcgtagctgtccgtgagcttttaattatgagaccaacatatatgtggtcgtcatgaagtatatctgtgtatacgaagtgttattataccactttgatacagacactctaccgtgcgccagtagttctctgtcaacgccaagcaggggatacatgcaaaacaaacatctggagttcatgtgtccgcttcaaatgctgttgcggtcaaattttattgaactatcaaccttatgtaagatttgattgagttcttgtaaatattttttcaagttttaatgaatagttgagctctctgctttactttaaagaaaaggaccgagttcgggaaagagaaagacctcgcttcactagaagacatatgtccacataaagactaactgaaatgcacaacattaacgctttgacaatattattatacgctaggtccaatcttcaggcatactggtcgcaaatttgtttatttcttgagataagatacgctctgattaatgaagattgcatttttcactggagacagacgagaggtatacttgagtagtggttcttttgttgagagacaaatcatataaaaataatgagcttggttaactagaaatgatatcgtaaaacacagcagtctccaaaagctagtttttttaacgaaaaaaaaagctagttttgtgtactctcgctattggtggatcgcagaagtccacaaccaacccacatttatgtatgtgaactggcaatttcaaaatcagatgataagggaggattcttgcttaattggctgcaggtatcattcttctgaagtcgtttgtaccaaccacaaaattaacaaaaggggttccatcatctcctgattgcaggtgttgctgaaccgagcaaacgaattctctactgcacagttgtacttcgcctcgtcagaaaagattagccacagtacgtccttaaaagccactttgccattataaactagtactaatcatgagctctgtacaatgcgataagatttgttcccatgagcaatcatgcattttgtggcggccactgtatatatgtcccccacaggttaacaggatgggatggaagtggtgccataaagttacgtataacctaattaggacccattcttgaaatcgacaaaagcaagaaataattctaagcattttttcagagaaaagattggtgtgtgtcatgcagatatgcagttcgctggcccggcgaaaaaagatatgcaggtcgctagttcagatagatttgagggcactagtcggtctactttactgtatcaatagctctaaaattcaaagttagtgattacaaaattcaatatatataatcaaccattccaacatactacttttgatttctgttttcttaaatttaatattcgaaaaatttataaaataatagatacaaagttattatactcctacttgtcatatggccttcattttagtttttcttaattaaataatataattctgaacttggaattaatcattacaaagttgtcctcggtacggactatatcagtttatagtatttgactattgccagatttatttgctactcctattagcatgagatttttctccaagtatcaatttagtgtgcgtgtgtgtgtataatgggaaaagaagtgcacttgaactatttgctcaatcctgtatgtaccttttgttacaaatttctcttttgtagcagttaatgtttgaagaatggtcaactgtagtccttcattggtacatgagaaaaaagaaatactttaccgtgtaaagtccactgaagaaattttcgatgaaaaccgactttttcttaatcctttatgtctccgactacttgaaaatgtggataaacattatagttgtattaatgttcatacgagtaggatacgtagatacctgtctacacttctactgtgtttttttttaaaaaaataagtttacagtctttatgccttggactacttagaaatatgaatgaatattatagttgtattgttcatacgagtaggatatgcctgtacatgtttataatggtatgtgcgtatgtacgagcgtgtgttaatctgtaccgtgctttaaaaggagaaaaaaaaaacataagctgtcctacgagtcctcctgaccatgacaatttgtcactagcatccgaggaggaaaatctcctcaccgttgctagagacttgggacgatgcggggaatcttccttggaaagaggtgcgagagaactagagaagggcgttatcaagatgcagggaaatcctccattcctcccatcaaatgcaaagaacaaatgaagtggcgggaccgcgctcccctgctgacagtgcactcggcagcctacaacagcagcagcatggcatccccttttttctctcgtagcgccatgcatgcacgatcagcacctacgcccccgcaatattattatatggctgtcacgatcccacccctttgatgagaggcccatgcatatgcacggttacatcacggtgcacacgaacgacgcacccctctcgtcctcactgtccctagctcttttaaatttctttatggttccttctcttctagtactcgtgaccttctcgcagctctccacacggatgcatatgcttcacccctctctgtacattcacaccttctgtcggtgtgtcgattttaacctgaatcatctgggcactatcacactactagtagtttattcagctgttagtatgttactgcacgacgtgcacatctgtacttgttcaggctcctgttgcaaacgcacaagtcccactcacatcgaacagtccatacagttttctttgtgtgggggagagcatgaaggggaggatcccccacgatttcaccggggcctagtgctcctcttcccgattcggccaactgggcagctcccatccctgcaggtggccacgtacaccgtatccctgatttcctatgcgtgtccgctggccaccgaaacagataagcttatttcctactcctagctagcttagctatctcctggcaggctggcaccaccaccagctcccggctcctgacaaaccgaaccatccaacacgtacacgtacacgcgcgtgcgtcgtcgctgcaggcgacaccgggcgagtgatggcaacgtccggacgtcgggtcgtaacctgtgcatgccatgccaaccatcctggggatggaccggatccactgctcacgtcgacgcgacgtagcgtttccaattgaccgcggcggcgtcggtggggcgacgacgagaacgtaccagcgcgcgcgcgcgcgtcgcgcgggaggaaacgagacgagaggtcgatcgctagcgcccgcacgcggcacggggtgaaacgctggggaggccacgttttttttttcttttttggccccgttctcgtgcggttttgcgccgtcgggtaagcggttaaaatccccacacctaatcaaacgcgggctcgatccgtagccgggggagatgtggtgctcctcctgctcatcatcatatggcaatcttggcggattgattagcaggggggagggggcagcacaaaagcgtggcgttggttccgggtccaacggccccgaatctgaaactctgaaactttcaacaacggcgatcgatgatgagtatcatcggccagtatggctgattgattacagggtctgcgtggctgcaattcgatttcgtttccatcttttggactttctgtactcgcgcggcgttgaatggatagaggggacgggacagggtgtgagcccctgtgttggttcctgctgtgcctgtgctctgctacatcattcttcgcttctgccacaagtcacaaggcctcctttttctcctatatatggagaaaaaagcgcaaataaatattttccgctttttagactctgctgcgctttgggataaaaacaagtgaggaaaatatgcaaaagaaggaagagttaattaattaatcaacgctacgtatatgcgcgccgtgttacgtatctcttgctgactttataggtaggagtactgatttttcctttttaccgctgatgatagtatatacaaacgatgttacttaccaagtgacaagacgtggacgtgttgctcacaatagtttgaaaaataagtaaagaaactaataatgcgtttttagacgggccgcgagaggccagcaaggcgaagagaaaaacggtgccgtttggtagtctttaagctggctacgtcatcgcacaatttgatcgttttgcccccaccacggggactcggggagaagagccaagccatctctgcagctggcttcgatgattttatgaagtgcgtagtacgaagtttacatgcacggcttgactttctttacgacctctctctcacatctcacctcgtgaccaagctggatatagcaggaacagtgccatgcgcccatgcttgcccgtgagaaaaaaaaggggagaagttaagtaaggtgagaaaaaaaaaagtttaaccaggattcgactggatacgcctttgcgtatttatttgcgaaaaaagagaagaagagagtgagaggaaaaccaaacacttcttttattaatcaccaccgttcacgtcgcctataaaactcgtacctacctgtctcctccctgttgaaacggcacaaagctccatccgttctgaaggctttgtggccgagttctcctcccccacctcctcctcctcctcctcctctgtagccgagctgaggccaacgcgagtagtgacattctcctgcaatggggtgcaagtcgtgcgagaagcccaggccgaactaccggaagggcctgtggtcaccggaggaggaccagaagctccgcgactacattctccgccatggccacggctgctggagcgcgctccctgcgaatgccggtaagaccaatcgccgcccgccgatgccgccgacgcgtaattcactacccctgccggccgccgcatgcagcatttgcgctccccaagcataattcgcgagctctaggcgcattgcaccgacaattatgcaccgaggcacacacacaaaatcggtgaattcgcgtagcctggttgcatgcggttctctttgctgaatttctcttgccgacccgtctgaattatgaaccaaaccgttctctgaacaaacaagactctgtttcttagccaattcgtgattaaatgtgcattgtgtgttgctgcttgagagctggtctcacaagaatttgtccggcgatcggtgcagggctccagaggaacgggaagagctgccggctgcggtggatcaactacctgcggccggggctgaagcacggcgtgttctcgccggaggaggaggagacggtgatgagcctccacgccgcgctcggcaacaagtaagcttttctaactagcaactcccccgacgagtctcgtcccagtcgggtccgtgcccagtccccacacacctcaccggcagcgcgcactcgatcgttcgcctttacacgcaaaatgattgagcccggagacaattctccacgttgtgcttgctagctgctgctgctgatgctgccttttcctttttcagtttagtactaatctctctctccacacttaattaagctacctagtgtagtactagtactactactactagactagactattagtaccaacgcaacagcggcactaatctttttcgtgagaaagctagttactctagctgatttgtcccagtccgggcgcgctagtgccgagctggcaattcgggttctagaacgcgctgattgacagattgtgagtgacagagtgagtgaaaggagaggaggagcggagcggaggagcggagaaatcaaaatatgaaatggtggaaagggagaattaaccggggtgatgctggctggccgccaccgcgaccttttccgtagtggagctgatgctgacgcgcacacgctccaagaacgctcctgcgcattcgaaaaccgcgagatttttcggtgcacgttgcgatgatggctagagaaaccgttgtgtgttttttttttcccctttcttcctttcgcgctagtacatttgtttattgtaaagtgcgggccactctggctgagcatgagcaacaaggacaagttgaggggggacggctaggataatgtggacttgcaacgctaaatgccacacagtacagttgcgtgcgtcccagaacaagttagctcgaattaattttttttttggggggggtctatttcttcgatttttctatcttttttgtacaggaaaaacggacactattcattttagttgtacagcgacgacgataacatgtcgtcgactggttggaccaatccgttctcagttgcgagttaatgaaaacagctgccttcacaatgcgaaactgtcacgtaggagtactagtctcgcgagaagattagattctttattgggcgtcgcaattatgtgcttccttacaaaaataaaatatcaaaggattagtggtccacatgaatagactacgtacacgcttgtccctttcaccccacaagtgacacattacatttctttaagctggtgacagaggaaaaggaaacgagaaattggaaagaaacctcaacttgtcaatgcaaaagctttgggttttccactaacccccaccgacagaaaccaagattagtgaattttaagctgtggcatactactaaccgtaaggcagagagagactgatcgatagatcattccaaaaggataaaaataacctgacttaatcactgacagcaatttttctactgcaggtggtctaggatagcacggcatctacctgggagaacagacaacgaggtgaagaactactggaattcttacctgaagaagcgagtggagagcggcggcggcaagacgagccaagggccaccaaccacgcctgcgtcagccgcgagctctcccgccgattcagacgactcgcacagcctgcagcagaagccgcacgagccggccaactccgactcgtcggagccggcgcacgagtcgtcgtcggcgtcggccgactcgagctgcctgacggtgaccacggaccacccgcccgtctcgaggccccacgcggcagtgacacccaaggtcatgttcgcggactggctcgacatggagtacatctgtgggcaggtcgcggcagcacctggtctggacgctgccggattcgcggtggttggtggtgctgcaggcgatcagcagcagcagcagcagcaggtgatgagccaggacggatcggttcatcaggccgatgggccatcgtgcggcgtggacgattcttccctgcagcagcagcagcaggaggggttcggtggcaacggcggctgctgggattttcaggagcagttcgacagcatcgaccagatgcaggcgagcggcggcggcggcggcttctgcgacctgctctccatgagcgacttcgacctctgggccgagctggaacgtaccgcgtgatgggggaacgacgtgctcaaggatcgatttttaattagagcttgttaattcatagatgtcccgtggaaatcaaattaaggggtgtttgtaatactactgcattgtaaattatcgcggtgtatttatagagctgtttaaattagcaacatatataaggaagatcagaggcatgataagtcacttctgtacgaatttatgtttgccactttgctttggagagcatgggcaccgacagaaagatggaaaggaagaaggaaagctgtagagaattgcgcctatggatgcaattattttggtttgtttattgttgacattatctttgtgcttatagtgatagcattatggaacaatctattcatatctcactttcaaagacccgctgtgaagttccaagttttgttccactccatgaactgtcagtgtatcagaggtcccttcctttacacgtaggctttcatttccacataactcgtaatgattaaaagtgttcttgtaaatattggatcaatttcaactagtgttaagaaattgcaccctcttttataaagaccaatctgttagtgcctccactttcttcccttttcttcctgcagaactttaattttatttctttttcttccattcatctctttaaatgtacatatattagtagaagctcccacttaataaacgtcatagggttcatttgttttaaggaaacaaatcctataatattattgtccccatgacgtggttaatggcatgtgagacccattccccatgggcccacttatcagctaccacgtccctactactctatgttatattttgcattactcactcctaagttgtcttttttttggacggagggagtatatttttatgtttgactagaatatcatcgttacattttttttattacatactccctcgttccagaatataacaactttgagcactcaacatttgtcccaaaatataacaacttctccccagcaatctcgttccaaccaatcataaccctctaccattcacttttcccacctaccttcactacttaaccaatcataactgtaacgtcccgccttcccccaggccgggcccgcttacatctgatagctttcataggtcatacactcgtgtgcacccgagaagaatttcccggtcggtcacccatcccaaattgctccaggccaagcacgcttaaccctggagaaaagaagttgcaacttgccctaggtcgggatgttacaccttcacccccttaagagagatcgacgcccccgtcgatcaaccctaggccaggtcccacctaccttcactacttaaccaatcataactgtaacgtcccgccttcccccaggccgggcccgcttacatctgatagctttcataggtcatacactcgtgtgcacccgagaagtgtaacgtcccgccttcccccaggccgggcccgcttacatctgatagctttcataggtcatacactcgtgtgcacccgagaagaatttcccggtcggtcacccatcccaaattgctccaggccaagcacgcttaaccctggagaaaagaagttgcaacttgccctaggtcgggatgttacaccttcacccccttaagagagatcgacgcccccgtcgatcaaccctaggccaggtcccacctaccttcactacttaaccaatcataactgtaacgtcccgccttcccccaggccgggcccgcttacatctgatagctttcataggtcatacactcgtgtgcacccgagaagaatttcccggtcggtcacccatcccaaattgctccaggccaagcacgcttaaccctggagaaaagaagttgcaacttgccctaggtcgggatgttacaccttcacccccttaagagagatcgacgcccccgtcgatcaaccctaggccaggaacgtcctctcttggccacgtccatgtgtccagtgccagcgcatgcgccatgctgtgtaaccactcccggtctacaccagccatgcgcaccatgccatgtcttttctgcacactttgtcctcactcgtgtgcacccgggaagaatttcccggtcggtcacctatcccaaattgctccaggccaagcacgcttaaccctggagttgtttggagattggcttccggaaaagaagttgcaacttgttgatatgagtattctattaatcctattaagccttaggtcgggatgttacaataaccctccattattcacttctatctattttcttaataaccgtgttcaactctaaaaatgcttatattctagcacggaggtaatactttttatttctaattttccaacagtgtaacaaaaaacaatattaccatatttcaacttaaaaaatttaatctttcggttggatctcccatcaatgtggagtttcagctttattctatactgtaccttcggttgtatggtatactatggttatgcatcatcccgtatacgtgacgtagaagataggaatagacatagagcattatttaagaaggataaagctttcttcaatttaaaccaaaagaaaattgatcgtaaagaggaaaagtaaatggcaaatatatcaatagtcatttcttctttcatgttcttctaaatggctataaaagcatctcctttgttgatcaaacaatgttagagatggagttcaggttcgagttcccttaataacaacggaaaatacttgttttacaaattagacttgacttatcgagccaggaaattcctatgcatatgcaacatcttgtgatgtctcacgtctctctttgcttgccaaggtctaagtgagtgaagatcaagcacacccttaataacaaaagagagaagttatgtttcaactaaatatataaaacatagctcgcccaaagtttagcatctctaaagcagattatttccgacttccatcctctgttaagagggaatccacaaatgccccatagatcatacgcagactctaatttgactaatttgaataataattcaaaactattttaaagagacagtgattacgagacattcatgctagtatgttgccattcaaaccttccaaataacaacggtaagctatggatttttttagaactacggtaagctatgttgatatactctttatgcttagggtgtagtcacatacatgttcttttttaccccaattaaatatcatcttttggcacctaaaattctattttcatattatttgtcgtagttacacttaataataacaattaaaacactacaacaaccatttacgatatatctatattaattatttagtcattatatttctatgctcctgctaatagattaagggttaaacttgatagatggaataccaatcacaagtagattaaaaaaaaagtaaaagggtctcattgtttgccttatgtttataagccaaagtttaattttgaatatgattttttgttttcttcatcatagtttattttacatcatttgtttttgagttgctatggacatgtatataaaattttactcataaataatttttatttgctaacaactgtggagattatgggtaccctatacccacacggcatggttatccgactagttataggggataacttatatctatagaatatgtaacagattatgacttgggtattacgtttccttgtatattacggaacggcctaaagtcctggtttgataagattgtaaagtagatttaggaaaccgataccatattggttaaggtttctatcttgtaatcctgccccccgtcctatataaagtgggcaggaggccctctagggggcatatgagcacatatgatcgttagatctaaactacatctggcggattcaaatcctcaaacaggagtagggtattacctctcattgagagagcctgaacttgtctaaatctttgtctccgcatccatccacttttaggtctcgtgcgctaccccttttattattgccgaattcatgtttcgacaacaacatatttggagtctaatcggtagtgcttactgcagcagcgcagccgcagccaaccagcccaaatctacacaaaacagttgatttgcagcaacatcaacaaggtgtgtgctacttgttggctgctgctgcactgtggcagccagcacaaactcaatgccttagataataagggagtgtttgaagagaaggggattgaggagattgggaagatacgcaaaacgaggtgagccattagctcatgattaattgagtattaactattttaaattttaaaaatggattaatatgattttttaaagcaactttcctatagaaattttttgcaaaaaacgcaccgtttagtagtttgaaaagcgtgcgcgcggaaaacgagagccaatctcccctatcacccctaaacgaacgatgcctaagtactttgagtaagcgaaacaatggaactggaagattgttttgaatttaaaaatacacataaaaaagtttgaaaagaagaccctgatttatcagcaattgagcatctcggcaaggttctcgccgctcggcgtcccggcccagccttttactcgtgggcataaaatagacagggccgatatcgtaatttcctccttcacaaatcccaaaccgccggtgccctagctatcgacgactcggcggcgacgcgcctccctggctccctcccgtcgctcctcctccccgacccacgaactccccccaatagggcagaaaggaagttcaaatttgctcctgatccgagcgccaaacgcctagattccaccacccaagcctcctctcccaatccgatctgccgttccctcttcgaatcggctcccccttctcgccgattaccgacgaatccgaggccctcctcctccttcgaatccatggatccgcgcgccaggtaccctcccggcatcggcaacggccgcggcgggaaccccaactactacaaccgcggcccgccgctgcagcagcagcacaaccaccaccagcagcagcagacgtcggcgccgcaccaccagcagtacgtgcagcgccagccgcagcagcatcaccaccacaaccaccaccagcagcatcagcaacagcagcagcagtggctgcggcggaatcagatcgcccgcgaggccgcgggaaccgacaggaatagcgagccgaaggctgtggcgcaatccccagccgtcgacggcatcgattcgaggtgagaccgtgagacgcgtaggccttagagtttggcgatagattatgtgatgttcaacttcaagggatgaattaaggaccagtgttgtgggtggcttgtttgtttaatttttttgtggcgaaattggaccaaatgcagtttgagacatatgctttccctgcagcatcctgcgaagtgagcactgcaatttcgtattccgtagtggcaatcactgaatgttttttgtccaaatatgtgttcatatgttgcctaggctggtactggaactagggtttgctgcattctaggtttgtaatttgtgaaactagaagttctacaaacagtaggtaggctggtgaataatatatctgatcattggcgcagatatggttatcacattgatcatatgctcaccttttgtgcagttcacaagactggaaggcccaattgaagcttccacctcaagatacacgatacaggacagaggtaaatcgcatttataaaattttcccctattttttcttcaaagccaggcaaccggtgctttgtatgctaaggattacacttgacaattgtaattgcaaaacatgttgactgtcatctgcgctttgccctacctatcaattgttattctgccaaacaattcagtgtggcaggagttcctttacctttatgattttttggtgtcgcacattgtaagctaattactatctccagtcacaaatacatgtcttgaaaattgacatggccttccaaatacagctttgacactaatttctaatttaatgtattaatagaacccactaaagttataatgttatgaaaaatcacctttcaagacaaatttacatatattatgttcatgtatccaatctaaatattgtaaatggtcttgaaagttttactaaatgcttgtccaaaacaagaattatttgtgacccaagggattattaattccgatgattgaaatttaatttgctaaactgggtttgaacatcttttcacacccatgagatatcctaatgttgctaatcgatgctctttatttctgttatccaattcaaacaaacaaagtttaatcctatgtggtcattgtaatatcatgttgataccttcttgtctaaaacaaaataataccttgatgacttaaaacatgcacattaagtgttgttaagctggaatgccccaagctccttactatcctggaggccacatgactcagttaaataattaaagtttcatcttactgagttactgtgctcttatatgttttcccttgtgctctttaatcttatttgtataattttatctttgtatagttcttccccactgtcttgattgaaagaataattgaattttcaaaagaatgtgctctcatggcttgagtttgctctggatatcgacattcttattttcttgctcttattttttttgcctattcttttattttatttggagatattatttatgagtttatatgatgttggtgtcatactctctgcatactttattatattctgctgttgttgcacaggatgttacagccaccaaaggaaatgagtttgaagactattttctcaagcgtgaacttctgatgggaatatatgagaaaggatttgaaagaccctctccgatccaagaagaaagcattcctattgcattaactggtagtgatattctagccagagcaaaaaatggaactggcaagactgctgcattttgtatccctgcactagaaaagattgatcaagagaaaaacgctattcaaggtttgttccagaatccaaactattaaacttattttgtaccaactctcacagtcaaacatgctataaacctgtgcctttataatgcctgttggacctcctttggtaccgtttattttatattattactttttttggggtgttggggggggggtggcctgtaggggatcttctttagtaaatataatattatattgtgcaagaatggttcaatgattgctcttgttatttgtagttgttatattggttcccacaagggagctggctttgcaaacgtcacaagtttgtaaagagcttgggaaacatctgaagatccaggtcatggtcaccactggaggaaccagcctgaaagatgatatcattcgtctctatcaacctgtccatttacttgttggaacgcctgggcgtattttggaccttacaaagaaaggtatctgcattttgaaggactgctctatgcttatcatggatgaggtaattcatctattctttgcaattgatattatattctcatgaaaactgttcagcagttcagtactcagtgccttcccagttgtatatgttatttcatggctcaaaagattattttataaggagaaattagggattgggctaaaaagaatagtaaaaatctcatttacaatcaaacaattagtgacaaaaaaaattagtgtttctatatacttaatgcaagtattttttttagttgctctttcctaagtttttccttcaaattaatgtttgcatccttcttgggttgtgctgaaccaatgaaccccgtttcttgtgtttacaactgattattctgcttgccaatacccatatgctgaattcttgttattacactatcccttgtttgtacttctttccagatatgtttgtctttagtaaatttcacgaaagcccaggttttcaggcatctgtaatgcaaaacccattgtattttaatttgttttaatgaaccccagattttgggaaacacttgactacctattgcactattttacttggattgtaaatttattgcttaagacaacagcaatgacaacacaactaggaatattttggaacatcctgcatacagggaaaaataagcacaaaaaaaagatttgagtagcccattcagagtgtgcggtgtgtctatgataggtacttggccaccgggaggtagggacttagggtgcgttcacgaaacgagaaagctcattaacacatgattaattaagtattaactactataaacttgaaaaatggatttatttgttttttaaaagaaacttctacatatattttttttttcacaaaacacactttagcactttggaaagctaatggaaaacaaggaagttgttgcttggagttgaagcttagagcagggccttagtattagtccttctaaaaagaaccagtgtaatggttcatgaggcgaagtagtatcttcaagtgagaactgagaaacatcgtggtttttcttttttgcaccatttaagattctagtgaactatatgaacctctgttttttgagaatctacgttgcatgatttggcttgataacgataatttgttttggttgtgtagcattgaacattttagttgataagaatttttatcttcttacgagtgaaatattgccttctgttcaggcagacaagcttctctctcctgagttccagccttccgtggaacagctgattcgttaccttccagcgagccggcaaattttgatgttctcggcaacgttccctgtgactgtgaaggagttcaaggacaaatacctgcctaaaccttatgttattaaccttatggatgaacttacactgaagggaattacacagttttatgcttttgtagaagaaaggcagaaagttcattgccttaacactctcttttccaaggttttaccgatgagcacctttgctttgtgttcagttagccacttttacctcccttatagcctgtaaatcatgcacatttgttttgatgcagcttcaaatcaaccaatcaataatcttctgcaactctgtaaatcgtgttgagcttctggcaaagaagatcacggagcttggttactcttgcttctacatccatgcaaagatgctgcaagaccatcgtaatagagttttccatgatttccgtaatggggcatgcaggaacctggtttgtacaggtatggaattctccgtgttccgcatcaactcttgactggttctattcttgatggatatttgttactgttcactgtctagtgaaatctcattaatgtcctactagaactaattgtttcagccgatctgaatgtattttgttacttcatccctgcttttgtatattctttttcttcttaaaaagaagcgttgatgacagtgttggtgtgctttatttacccgcaatccagatgttccgtagatggatttatgtgaatacgcatgtgttatatcttattttactaatgtattcattatttgtacatgtgcatatgttgttgttagctggtggtataattaaaatgtatgcaacctttttgatccaagtgtaattaattttcaaactcacaatgtgtcatacatatatttgagatgtgtggcaacacaggtacaatgaaaaggaggaaacaatatgctaattttaatacttcactaccaagttctgtttcttgcaagcctccataattcacttatatggaatagttttgaaatgttgtgattttgtgcaagtatatagaaatgtgtggatatattgcttacggctacacgaaattctgatattctttcttctattttaacttttcatttcttttttctttgcagatcttttcacaaggggaattgacattcaagctgttaatgttgttatcaattttgatttccccaaaaccgctgaaacatacctccacagggtatggcatttgaataaattcagcttttgatcttaggctttaatctaattaggatgtcatatgctgctatgagaataatattctagaaactaatcttaaccagtaagatgtttgtactaagaagaaaatgcacacacaagtgttagatcaaatgtggaaacatgcacacatatgttttatcatgtaattggttgcccctgtaatttgttcatagtttggaactaaataccaactgttattgtcatggtatctctcctttgcaatgttgtgtaggcagtgcagttctttaactgttattttgttggcctttttctaggttggtagatctgggagatttggccatcttggcctggctgtgaatttgatcacctatgaggatcggtttaacttgtatgaacaattacccaccacaattttattcatgtattttattctgacgtttggttcattgaactaagttttctttctgggaacaggtataggattgagcaagagcttgggactgagataaaaccaattcctcctcagattgaccaagctatatattgccaataatttgacagagttccagcgtgtattcactttctctaagggtaataagaagacaattcttgtaaataccagctcatcaggtaacttattcttatgatgaacaagggcaatgcttagcttttaattttgttatttcacaactaccgcaatggaaactattgttttctgttttttttagttagcctggttttactgtcagaaaatgcaatctgcacatatccatcaaaggcttttttagttaacgtatgtccacatgcgaatgtggcatatcactggtcacatttagtccaaaatgaaggtgactgtaagagcgaaatctgctgcatgaacatattagtgacactaaaatgaatgtaactgggtgttttggcatccctcggttgtcaataaccatgcaaatcatccatgctgcagcacatacatctgagtttgatttggaggttgaaaagcgaggtagatggcagatgtcttggaaatgtaacttttcatacataaaacagtgttttcaactttatctttttttctgagtcttgcctactttattcaaagaactaggagttatcactatttctttttctagaatttttttgctgttgtgcattttgtcatggcatgtgcatttgttactttattttgccttaaaagtaccatcatagtatttaaatgtggcagttccatgttcactcttttaactttttaacaacatagcagacatgatctccgtttgtatatgtgttttgcatgctgagattgcttgctcaagagcttataaattgccaaaattcaggagctttagttgacattgtgttacatgtgcaggttttatcatggatctcctgtggcatatgggaacattcatttttggagttttatttgagatgagacagactactcttccgatggacaccttgtgcttatatcattttggctaactaaattcaaacgccctcactgaggcacacagtagtgtatattgctaggtgcctgttcatgtgcctgtcctggcctcttagctcttatgataatctctccccttctctagatttcgttatcggctatttctcacaggacattttaaccctgttagtggttaactggttgtgggctgtgccatgtcagtgcacacattccagttgacgtgccatcgggtgtggacaagttcatccaacttgtgctctgaactgtcaatgaacagtaagcagcacaacaagcgtcttcagatattagcgaataaatctgtcgcaagccgcgtttctgcatccgtgccatgcagctcttctcttgcatgaggcttgtgccattatgtttagattctgcctcttataattgagtctaatggttctacaaactgagtttacctgtcctgagaactgggtaaaacatgtggtgaggcacatgcaacttgataaataaattttttacttaagtgaaattctcactcctggttcattctatgtttgcctttaaccgtgctggaatattttcgctgatggttaccaaatccacggtgctatggttggtgaaatcttgaaaagattatgttaaatagtcccaattaattacagctatcttgaaggatatcatctgttactacttgcaatgatctactcataataccttgtttgggtgtcttaaatcccaagatacagtctgttatacgggttcgtcgaagggatttgtgcaccctgccatgcttgtaccctgcatatgctatcggtggttctgaaatcctagcacatatccctttcgtttcataataaaacaacgtaatattgagtgtgacacgttctaaaattataaatctggatctctatcagatttgtagtattagtttgtgtcacattttttatttgttataaggttggtttttcatgggattgatggagtatagcatactgtagcagccaagaacagaaagggaaatataatcatgcgcaatgaatgggtttgcgtatcaatctcccttccattgctggacaagcccctctgcacagccctcacgggcgtttagcatggtaagctgagagtggcaagtgttctcaagcaacaggggtggggtggtcgtcaatggctccaacgtgtactaggcactactgaaacatacaccccctgattcccatgcggtcgactattatatgcttgtgctgcgccttgcattcaaacagtaacagtattttgtgttcttttctcatagtcgatttttgcagttgcagtgccatcacggtcaggggatatttttctccggcctgccactcttttttagataagtttctactcatctctgatgctgcgactgtgagaacgacaacacctgaccttgctacggagtattttgtcgtaactcttgtcttgcgatcgtcctggaggttattcaaagctcgactaggctagtttgaaattggaccaccaattgcatatccagaattgatgcactggaaagcgacgccctgtatacgaaatgggcagtgttgcagatcttgaccaatactggaggatctttatcctaagaaaattgtgggaactaggaaaattgtgggactaagaaaattatgaaactgaatactgaggagttgtacatctctctaccttgggtgaagtagcaagactctatcctcctctcctgttccatgccgtctcgactccatcatacaccatgaatgagaactgacactgcgtcgccttggagaacaaaaaacgtggtacatttggctcatctggatcgtctggctgaaaagagcgccacactgcatcggaaccgctacagtgcttcgcctacagcatcaacgacagaaacagcaccggtacatgtaccaacagattaaccgaacagtggcactccgagtcccccccaccaaaacacctgtccgtttgagatcatcatggcgacgcccgccccgcgcccagcccacccgcttcaaccacgagccctcccctctccctgcgagcctgcgtctgcgactgccactgcagtgcagcggccacagcgagcagtggatcgcagcgaggcaggaactcatctctgaactccacatttacttcgcccctctctccctctctctatgtgacccatacgctttcccagactcaaaatccgagctacgctcgtttggccagaagcctcatttaagattactccccctgcttttcgtctcggcatcgccggccttgctcgcactattactcccacgcagttgctgctgctacccccactcatcacactggctgtcaacgtgcggcgctgctaccgtgctacgctcaccaacgaaagctgccccgtgaaaggctgtaggggagcatggagttccttgaaatgcatggtaactggtagagatgttttaaaaataatagccatttccctataaatttctataaatttattgaaataatggagatttatagtaaactggtagagatttatagggaaacttgcgatgggaaatagccatttataaattttaaaaataatgatttatttccattatttttaaaatttattgaagattttttttttgaaatttatagtaaacttcttcaataaattttaaaaataaaccatacattaacttttttttgaaacaaaaccttcagctacggttctagccatagtgtttggtgttacatgctaggatcagtgcactgtaatattattagggggctattataccacgagattatgtctaaaccaaatgataccaataaggaattagactctgatacttatcagtatcagatatagtacatcaattgatacatatggataccagccgatacctaatgataccaggcagataactactagtaccagacttggtacccgtcgggtatcatatatgaagcttagaggggagggagaggagcggagatggttaccggctgcgattctctcaccgtgagacgatggcgaaaaacgcaggcgatgccaaatctaccttccttttccatttcccctccatttcctatattcttcctctttccttcacatcttcctcctctgtttcttctaaacgagacccatcccgtccttttgcattgtgtggctataggagaccaaattgccccctatctatcaatgttaaggcttcgtcacagccatcagctcgaccagtccagtccataccatcaccgcccctgtgtgtgaagaacccgcactgcaccaacgcaccacaaacagccgctgcaaaatctagccaccaccgtgcaacaatctcgtcgtggaatctagccatcttcaggtcgttctttgtcatagcggcgcgaggaagtgagagatcccgtcccaaacacgaggaatggatttcctgtacctagcattcccataaatattatgatggagttaattttgctaagagcaatatagcttaaaaagagttactaactgtacccaaaatttaaacatttcaatctaaatttagctagaaatgcttgtattttaggatcggccgaggaggttgctagatgtacacttgcgtaggacggtaggagtaggcccaaatgcgacatgaggtcacggccacaaagttatgatacacttgcgatgggtacccaacaattagtactactagtggtgcttatcatacagtaataaatacttcatctgaattactcacttgaatgcttgatctgatggcccgaagttactcttcggctagtttgctttggtacaaagtactccccatgaaaggacatataccagtgatagttctatctctcccccgcttgcgtatcccggccactcgactactcgagtagtggcagcagcacgactgcacgacgctagtacccgggcgtcaccgtcgccgttgcgcgcgcgcgctgtacttgcaagcaaaagcccccctcgtcaattgaatgcgtgcgtcgcgcaacgcaacgcaagcacgcgccgggttttattttcttttcttcgtcgtctcccacactctccgcttccgttccgtctcgttgttgttgctgccgcagcagcgcaggtgaaaatctccggcatttaaggttgcgccgcgggggatcctcctcggccacaaacaaaaccaccctcgtcctccgcgcctctgctagcgagtactcctacatagactagccacgtctccccccaaatcttttcgcacttcctttcccctccctttcacccactgaatcactcgaagtcgtcgtctcgtccacggccctgctgcctcgtgcgctccggcagctttgccgggggtgggtgggggagcgcgcgccatggggagggcgccgtgttgcgacaagaaggggctcaagaaggggccgtggacgccggaggaggacaagctcctcgtcgactacatccaggccaacggccacggcagctggcgcctcctccccaagctcgcaggtaccggctggcttctctgttcttgcgaggcaatgctttgcttctgtcacgttttcgtgttcgcgtgccgcactagtgctgaactgctgatcagcacattctgagaatctgtcttgatgatttcggccttagatgctgcttatactcgattgcatctgcataccttcaagctgcaataatcacccacaagctcgattggggctaaaatacacaaattatttcatcgtatacaaagtaggagtactgattaagtcgtacactcggcgagtactaggctcactcgtactactccctgctgggttttccttgatcttcactccaggcatcagcattgcctccagctacgaacactcggtcactcactccagggctccaggctcctaccattaccatgcccatgttgtgctactctcttttcgtgcatgagaagtactcggtattattcacaggagctgagagactctagtccgttccatctggataacacttcgttttgcgttgcatgcagggctgaaccggtgcggcaagagctgccggctgcggtggacgaactacctccggccggacatcaagcgcgggcccttcaccgccgaggagcagaagtccatcgtccagctccacggcatcgtcggcaacaagtaaagtcccccttgctcgtcttcatctccttcacctagcgagcgagtagccgagcaggactggcagactgaccagctcacatcgcacagccactgtgtgctagtgtgcactgctcggtgcgcagctaagctagcgcaccacaccgtagcactgtacatgcacactgtgcatggctcctcactcattcaatgttgacacatcgcattctccgatcatcacatcatatatgatatatcccaaaccggccggctggtgtactaccagtatatatagtagtggtacttgcttgtttggagtatgtacatgtctagtttagcttggagtcccagtgtatatttaggccattccactctaaaatttttctccctatcacatcgaacattttacgtttgaacacctacgcgaagtattaaatataggcttaaaaatgactaactgcacagacacaactaatttgagagacaaaactttaaagctaattgctccatgatttaacaatgtgatgctagattaattaggcttaataaattttactgatgaattctataattagttttttttattattgcccaaacaccttatataatactcgattataatacccgatgtgatacgcaaaatacttacatcccggatctaaacaccccctttactcatttactgtagttctatactgtggtaaatattcaatccagttagatatcactagagtgtactactactagcagcgcattgattagaagtggtggcacacacctgctgtttgttctggccaggtggtccatgatcgcggcgcagctgcccggccggaccgacaacgagatcaagaactattggaacactcacctcaagaagcagctgcgccggatgggcctcgacgatccgccgcccgggccggcggcgggctgcccggcggcgcgtcacatggcgcagtgggagaccgcgcggctcgaggccgaggcgcgcctctccctcctctcctcctccggcgccgcggcgacgacgacgatcaccgccgccaccaccaccacctccgcctcgtcgtcctccaccaccgcggggcccgtcgccgccgccgcgacgtcacccgcggacgtgttcctccgcctctggaactccagcatcggggactccttccgcaagctagccgtggtggcggcggggtcgtcgtccccttcgcgggcggacgtcacgaaggacgctgtgaagcaggaggaggaggcggcgccggccggggacgactcgtcggcggcgtccaacgaggtggaggcggcgaccatggcggtggacgagtaccagatgttcctcgacttcgccggcgaggagctgggcctgttccacggccggtacggcggcttctcgctcttcccgccggtcgacttgctcgaggcgtcgctggagacggcgttcaagtgacccgtacgtcgacgacgaccttgctcgccgcgcgccatgtacgacgtactacgtactccgcagccgcagcagcagcatcatgcctcgacgtaggagtatgtatataagcaagtgttctggggcgtccggacagtaggcgcgtccgtgtgaagggtaggacacacgtacgagacgtgggagaaaattttggggatcaattagggttctaaggataatctgtagcttggggtttaggcatggggggaacatcatggtgtgtattagtattacggccttttggatggcattctctggggggcaaggggcttaccggagatgctctaatacattcaatgatgttcgatctttcagtgttggatatggagctggttttatctgtgttggttgatctcagcaggaaaccaagagaagagagagtttgacgccaagaaagaagagaggaattcaggaaagttatctaccaggaaactacggcccttgactttctgtagaccaacaatggacctcgttacttctgctgattactcttcagccttcaagcactggagctgtgctatagcccctagtttatcctcgtgatctttctctgaggttgtgttgaatatatatacataatcggttatagtttagaacttaaatttatattagatattaggatagtagcgaatcttctgtgagcgtatcttttgagtttacttttactgtcttatgagcatgtcgtgactatcccgacgtacggtaagtatactatcaagattgaggagataacttcgatatacgatagaaacaacatgctactttgaaatgtgagacatgtgtcagaactaaggaagagatcaatttcacttgtgagcctgcctacataagaaagagtggtcgtattaggtggattatgatagaaagaccataaacatcatgaataacggaaagactgttatgactagtgagaggatgaggctcatgtttgtgcaagctacatggggacacggttataggtggagtcatagaagatgggtatgttggtgttgcagtgcacgttcttgaagaccgtgaggcaggcaaaggttcgtcgagtggcttgacgtgagcggcgaaaggaaataacttaagtctaggtacacggaggtttgcacattgagtaaattcagatttgcttgacatattcgctaggtggagtttgttaaaatttgtatctaatatatgtacgtaaatgattatgactcagagtcgaactatgttctaggctctcctaaatagagatacacatatgttctaaccacgtagcaacttagcatagatgattcttttaaccatagtggttatagtcaattatccagttccattcattatgcatgcatatcccttcctccctactctacatcttaggctgtgttctttccttcaagttcccaacccctctccctcgttttccgtgcgcacgcttttcaaaccgctaaacagtgtattttttataaaaagtttctatacgaaagttgcttaaaaatcaaattaatatatatatttttttaaaaattagctaatacttaattaatcatgtagtaatgcctgctccgttttgcgtcccctcctcccgaacgcagccttagatagcttgaagatcaaccccgtctccctgacttcccacccttttggtcccgttcgtttctgctttggattaagattaaaaacgggcatgtaaaacaaaaaactattagcgtatgattaattaatatttaagtactacaacttgaaatataaatatatttgttattttaaagctattttcatatatattttttcgcgaaatacgacgttttaatagtttaaaaagtatgctaatgaaaatcaaggtaaaattttaattttattgagaaaaatgtgctaacgaaaaccaaggtaaaatcttaatttcatcctccctcgcaattcttttgctccttgataatgcttctactttgagccattgatcatcttctgtacataatcgtctttcacatggcatcactttttttcatttcccaaggttcgcacatgtaaacactattattttatcaccctttagtatgtaactttggtggtgccattatcattatcaggatttactaaaccattgggaacaaggttactgtcaccccacggtttggtggttaccacggtagccatgcggttactgcgaaaattataaagtatatcgtgattttaaaaactgagaatattatcacctataataaccaccatagcacgattttataaactctggtcactatacataattcttgaaaatccgttaagaaggaatgtactttttattgataaattttatattatagtagtgctaatatgcatgcatcgagatgcatgaatttttatgtaggaatcagattacggttttctttagagctaacattgctataataccactttgcttaaaggatattgctaccactgagtaaaagcgcgtgggatcagaaaaaggggtccctgatgtgcagtggctgactctgtttgacttgtttctattcagaaaaaggagtaaatgcaccggatagccggtggggccagcccgacgagaaaacgaatttattgccacgctcagataaaaggccaaaccagagcagcgaaaggtttgccacgacacctgcagcacaggagcagcctgttgcctgtggtggcttcatcgccaggaaagaacagaaatgggcagggcaagctcgtcgcccctacgctaatgattctcttctgggagatactattaaatgccgtgccattgtggtcctttggatatgattgtcatttagagtttgtatagttcatgttaaaatttaaagtttggttgaaattgaaacgatatgacggaaaagttaaaagtttgtgtgtagaaaagttttgatgtgatgaaaaagttaaaagtttgaaaaaaaaattggaactaaactcggccttaatcaggactgtcgtgatggataacagtgaagaaacgattcttttttaggagtaaagtaaccttcccacactgtttgctcggtttgtgatcgcggcaaaattttcacttcatacccagggagaacgtaaaaattactacgtatgttccagtcatctagtagaatatttaggcccgctttattcgaaagaaaattatatgatttatatggattttattcctatatgatttttttcctcatatagtcctttgaatcaaattaatggtcactatagaatctcataaaatttatgcgaaatatctcattccgtctaagttttggagaaaatctaatatgaggtaaaaccttatgaatttttttttcatattttcatctctccttaaattcctatgtttttttatggtccaatcaaacgatcattctcatcttttttttttcaatcatgtatgttaaacttgatactatcaaaataatgtgtttttcgtgtttcttcattttctcagtcttgcattttaaaaggccctttatacttactccatttcaaaatataatcgtttctaattttatcctaaattaaactttcttagtcccaccgtgtttatagagaagagtattaatgatgatcatttggtgtcgcaaacactattgtcatttcaatacactcgatcaaatttagaataattcgacttaagtaggatgatgcttatgatataggacgaagggtcacaaatctgatccaacaacacgctgtagatggcgagtctttgatcttgtcagagggtagaggatcctagcaacttagggcacctttgaaatggaggattagcaaaagaattttggaggattcatttttctaaggattttttacctatagagccctttgattcatagggagaggataggaaaacttccatatgattgtattcctatgatcaattccataggaaaataagcaagaggttagacctcttgtgaaactttccttcgttgagtgtatactgtggtataatcaaatggctcttctctccatttcctgtgttttcaattcctgtagaattgaaaaaacatacaacttcaattcctacgtttttcctattcttgtgtttttcctatcatgcgtttcaaaggggccccatgtacaatggtctttattagtggtctatctttattgtcatgcaagcatatttggtgacgtggaagagagagaaggacaaagaaagatggttgctacgcatgacaacgacatagagtcgactcttagcattattaggaaattttttgttgcattgagtctaataaagaaaagataactagtaagaaaatattttagtacattaatggttagagaccgtattgtcttaactattgtaacgtgatagactctaattaacgtagagaccatactggtttttgtctttgtacttgcccttaaactccataacaatatgccaatccaaatcattatttgtcatgaataggctcttttggacatccaagtccttacataataactcccatggacaagagaaagaaggcattaatagaatgaacagcctaatatgttacacttaccgaacaacgtctatgtttggtcatgtgttctacaagtgatgttgtagttcccatatggtggagataatttcggtacttgctatatttcactcaagaaggtagaaggcaaattgctttacgcgatccacagagaagtcaacttgattcacttccccggccggggatcctatagataagaagattaggagagttgccaaactctaaccatcatgcatgtaccacacacttctactatgccaagggttgtttggttcaccatcaaactttatcatgtcacaattctggcatcccatagtttgttttatccatatttatttcataatcacacttatgagttaccgcggttaagctaatcatgctacaaacttgtaccctataatttattggcgacactttgtagtttaccataacttggatgcaagcttataccctaccaattatgccctatgttggtcctacagaccaaagacacaccaaggttctagactaataagccataacacctattaacaaaaaaatattttttgtacataaaacttttttatatgtgctattagcgacttacaagccaatgctagaaaataaaatacaatgaaaaataataaaaaaatgaactttaaatttaggttttaaaactcaaattttatttgggcatataggctgaagagcaaacaatagagttgcaaaatgtttaggatttaaggttttgtgtattttagaaaaaaaaactgatctactttcattttatatttcaagaaagcatgggtaatagaacatttaaagggatataactaaaagcaaaatatatattattacaataaatacatatgttgagtatatatactcctttatttaaatagactgcaaaggtggtgacagtgagtttgccaccctatctattcctatatattgtagttttatgtattacaacttgaacttcttaatatgacaagatagctaaatctaaatggatagctatatataaaattaaattaaagtgagtattctctaaaacaaaaggctggtaacatatttgatgaaaattatgccttttagtttcaggaaatattatgatttttttcctttaatcatattaaggcatggacatttagatagtgctacaaatagataaacgataaattacacttactttggtcttgaacaaaatgttttaaacaatcatgatttcagtggttgtatttgtattctactagtatatcctacgactgtaagtgtaacagaagatatcgtaaaaacaactcttccacaaccatcaatctgctagtacaatacatttgtctcggtttagaaattcccatgctatatgtgagatcatagtattgattatacggactacccacacttataaaaaagagtaaatttcacaaaactacaggtgttttgaccaaattatcacaaaactacagatttaaggagttgtatcacaaaactacatatttagcactaaatttatcacaaaattacagattttagattaagtatcataaaatgcatatttaatattgaacttatcacaaaactacaacttttggagtttaaatcctagcaccattgttatggtggagctataaacatcattactttgtgattaaattgattataaacctgtagtttcgtgataatttagttactaaatatgtagttttgtgatacttcatcttaaatgtgtagttttgtgataaatttggtgttaaatgtgtagttttatgatacatcgagttagatctgtatttttgtgataatttagtcatagtatatgtagttttgtgaaatttactctataaaaaaataatgcattcgctctaaaatatagaatattaataatatagttatatggataaattttctttatatttcaaaatggagatagtaacgaaagatatatactacgtgctcaatccttatttaatcttttgaaccgtcctgctttttgccgacccttagtttgtgtttagttcacgttaaaattgaaagtttggttgaaattgaattgatgtgatataaaagttggaagtttatgtgtgtaggaaagatttgatgtgatggaaaagtttaaagtttgaagaaaatgtttggaactaaactagacgtgtaaaatgccacgaaatttgtgggaggacatcacagacgcggcaataccgccaattggctgagatgcacccgatcgttggatgccacgtaccctagtctctatggcattgttggctctgaacaaacccaaagcatggcattttctggctatttactcccagctcctgggctcaaataatgctcaatcaaccagggacgatcggagctgagggagctttacaaacaaccgggtacgagacgagtcgatcagccggcgatcgacgcactctccaactctggggcgaaacgagagaagacatgcatgcagaagttcacgttgtcaaggaggcgatctcagagtaagtttaatagtagtataactctaaatcacctatagataatgtaatagacaattcatacaataattacttactatactattaatatccggtcccactatcatatacatattacgtcttggagtccgtactgcagctggctacaaatttatcgctcgctgctcttctctcttcttttatctttttaaaatatatttataactggcttataggctgctatggtaactgctctcacttttgctcggtgttggctctgggcatcatgcattgaatgcgcctaggacgacgaagagaacggagtcggagggagagaggcgatgcagttggggttggggccgctgcgacgacgcatgcagccgcgcagacaagcgtaggagcagcaggggaacagtagcaggtcagatagcgtgtgcggcgcgagcgagcgcagcattgattgcttgtgaatgtgcactgcctctggcacccacgtcaaattggggaaaagctaggccggtcgacttgaccggacgatgcgccgtactccaactctactactccagtcttttttctcggttgcacgagtactcggtgtaccgatcgggcgggccggcacgacgctacctcccccgtacgcgagaacgtggtgcctgatcggaggagtacgctacactatgagcggggaaagagcgcgggaggcagaagcagaaagagttagcgtgtgcctcagactttgattgcggtacggctccgtctcaggggcggcattcaatggttgtaggcatttggcgtacgtcgtgttttgctcgacgttttgtgcggttattcgttgatgagaaacagccgggggacgacgaggggtggcactgtactggtgggcctggtgtctggaggccttgggttccataaagttcagtttatcagccagattaccgcgaccagaccaggagtccatgccgtttattgagccgtgaagacgccgaagtaaacacacccttggcctacaacaaggtcttcgtcatccattgatttgatttgattgcgatttcagagctcaggccagatgacacgagcataaacatcgtgaaaataattttccagcaagtcaacctgtcacgttgaacgaaactgcttttaaaataactgaatgagtcaatttgtaccgatgtacgaaggtaaaggagatattatatccggttttacggttaaggaatacgattcaatccaaaaggaagagttgaaagtcgaaaacagacttatacgaagtgacgagccatcaaagtgtggacacccaagagcccaaaacttttgcaggctgtagcagcctatccactgcggatgtcaacgacccaaattcccgtgccagctgttgcggtgttgctcccttcacctcgtgagtcccgtgcccaccaccaggcgcgcgccccacgttgttgcccgttgggaccggagagagttcacgcggcacctgcgccgctcccgctccatcgcgacttccgcggcccgtctatgcgccgcctctttttttttttctttctttcggggcgatttcttctctgttagtgcaagataataatagagctcacttactattattagccaatcttaaagccaacacatataataaattagctataaagttggctacaattttcttctcatctctctatctctcacttatacattaattgtatttgtcttggagcttgtgttaagctagctcttgtatgagagccaacacccttaactttttgttacatctctcctccacataagcttatagtaggattatagctaacaattatacttgctcttagaatctttctcaataagctgataagaaaagttcgttttatgagaaaatgcatcgacgattatcaatcttaacgtgttattattaactgcactcgaaatgttttagaccacacaaagaaaaaatcatgagtcaatgacatgtaggacctacataagtcaatgacatatgggtcagatagcatatctcaaattttacaaaattataatggcatggttccaatttttccaaagaaaaaaaagtacacacttacaagttacaacccaacacaaataactttcgaaagagaaagaaaaacaagtatatggctcggatcgatgtttcttatgccccaaaacacccgatatgtttcttcggtgtcactccggttgcacggtacttagctgctatctcctcggccttgatcacttcttcaccgcgccgggccatcaccattgctctcttttcttcagcttccttatggacgattgcttccttgttcttcgccttctcagcgtactctgccttcttcctttccaactcttcctgtgtactcacaggttaattgtagaacagtgtgggtgatacacatttatgttgccaattctcaaacaagcaacatggactacttaaagaaccaatcactcatggattttgagtgtcaccagaaaacagagcaaatttcttccgtgtatcatttttctatgtactatatattgctcgtacttcacacgctgacaagttaatcaggaattcattgcattgcaattaaacatcatatcctttcccaaaataaaacaaaatccaacatcatcacaaaccattttgaaattcttatagatgagatgtgcagagtattcaaatttcaagcaccagaaaacataataaaattatctatctttttttattaaaaaatttatcttttttttcgcgaacgattaaaaaaaattatcttgacaagtgaaaaaacaatgaacttacttccttctttttcagttgagtttttattactgccttctttgtgttctcccatgaaataatatccaataacttcttagaggccctgacacagaaaagaagtgattcggaaggttatgtgctatgtttcctcaataaacacaacatgttgtaatggagccacatatgccctgacagtaagacatggtttcattttggtttacacatcatgttcgcacggagagagattctggccaatacgggcgattaaattttgattatgtacctgttctccgcttttgccttttcgttctcctcccatgctttgatcaacgattctcgcttgtctgtctccacctttgcaagggcaatatctaaaagtattcaggtgttaatttagctagaggccctcaatttgccagtgtgtaaagggaaaaggacagcataagttaatcacctctgtcatttgaggtccttgttggtgttgctgttgctgttgccttctcagcatgaggtttatcagcaacctctggtatgtgaaaaatcatgatcagataggtagaaatcagaagaatgacttaggtcgacctttgcatggcaaacaagctaaaaagctatagcgttcaagaaatcatgcacactagtctaatctccatttcatatgttgtttgaattgaaaaatgaaaagatgtgaatggctgagcattctcaaatagtattactataggtaaaagactgcacgccaaattcgacaaaactgagccagcaaagtactatactcactctcgacgaagacgacgagagccttggagtcatcggccggcggctccgtgtcatcatcggtcttggagatcaccggcgatgtcgaagccgccgggatgacggccttctcctcccccgcgttcgctgcggcgggcgtcgcccccgcctccttcaatgcctccccggccatcttcaccgcgctcacgctacgctactgactcggcgcggctgcttacaatgaaaccaggcaccgtactgcttttggtagctagtatactatacgtttggtcacgacgactcacgggctgctgcgtagtgcgtactgaataccgactgatacgctgaggcctgagctgtgggtctctttatatacagcttctacccggccgggcttctgcctagaagagcctggagtgagtgcgatcggtccatcatcaatacattagattttggatttgaatttgaccgtaaatacgagggatttggagtacaatctttctccatccatccgatcatcgtatttattgctaactggttgtcacatggctaacgtgattttttccaatcaaataaacttttagggacaacaacgtaatttttacttttttacattaaactctgctagaagcctagattaacttagatttattaagccgagcaggttattgtcacatagtattatctacttgattataaaagtaaattaaaaatttgagaaataaactaaacagatagattaaaatacgtgatcttaacaatgcaatggaacgaaatttaagtttagccgtaaaagtcatgttgggatagttcgatgaataatctttttaagagagaaaactgaaaatccattatagttatcgacggagagtgtacttattttagtaagtagtagtaagcagtagtaagcagtaacgtgactggagaaatatgcgggcgcgtacgtgcggcgcacagggtgccgtcctctccagctcgccgccggatcggtcgtgccatccatcctcaaccaagcgtaccgcgcgggcgatgtaccgcggctccgtccgtgtattccttgactacgtgcgttgcctctcagacgtggaaggcaggggagccgcgagttttccgaatgagctattctgctgcaatccgcaagctaatttacgttgtggctacttgtttctagggtgaaaatggactgggacgattggattatgacattcctattatcctatattctaacccatatttttttaaaaaaattcggaaccaggtacggataatgccgaataacatatcactcatctcatatcctatcccatattatttccttcgaatcggatttgggaacatgtctccatttgtatctctaattcatagatattaaatataataaggtactccctccatcccataatattagacatggtaaaagttacacggtctttaaaattaatctttaacttataatttctcatatgctataagagttgtagcaacaaaatctatctattatattattaaaacagccttgaaaggaggcaccacgttcgctgtgggggctagaaattcccacattaatcggaaaaaaaaagaagagtgcaaatagaaatacaatctaaaaataactgaaattcggaattaaaagtaagcaatattgaaagaggagtccatataagaacccaatacgagattaatcaaaattctaaataaaaatgaaataaaatccgaaattatcaaaaaaaagagagaagagttcgagtaggaatacaattttaaacggaattaaaaataaggaatattgaaagaagagtacatacatgaatccaatacgagattaattaaaattcaggataaaaaataaaaaaataaaaatagaaaaatgaaaataaaaagaagagttcaagtaaatacaatttaaaattaattaaaattaggaattaaatataagcaatattgaaataagagtaaatataagaacccaatagtagattaattaaattcggaataaaaaataaaataaaatatgaaattagaaaaagaaaagtaaaatttcaactaggaatataatttataactaactaaaattgttgataaaaataaagactattaaaaaaataccatctaaaacacatgatgagattaattaagtagcaggtctatagaggagcagagtggtggcggttcataggacatctaaaaactattaataaaacgccaaacaaaatcctaatgatgattaaaacgaaggacgacgggcaggtcgtgaatcaatcggtcaaggcggttggcggggcttctagaaagtaaaaaaataatccccaatgataatcatatttgatttttaaaatctcaattacaataaaaataaaaggcagctggcgggtcgtatatgagtacaatggcagagccaccgatggttgtgggtcttctataaagtaaaaaatgaattccaacgatagttatgtttgagttttataatcccaatggcaataaagagtatgtggcggatgggtcgtggaggagtatattggtagcgcttgataggatttctattatgaaaaaaatgaaacccaacaggacaataaactctaaaaactataaggtccaatttttaaaggttcaagcttctaaaaataaaaaaataaaccccaataataatcatgtttgattttaaaatctcaatgacaataaagaagggcggcagcgggcgagccgtagaggagtacagtgacaaagttgctgtagtttcggcggaacttctataaaataaaaaaatgatcctaaacaataattatgatatatttttaaataataatgataataaaaagaagatgtaatggacggtcgtagaggaatataatggcagcgtttgacgggacttctagaaattataaaaaagaagtccaacaggacaataaagtctaaaaagtttttagatctaatttttaaaggttataaggagaatgaaatagaaacagtggtagatcgagttatataataacgaataatatgatagaaataaagggtgctgatgtgatttttaaaaactataaaatttgaaacacgaggataataaggtttggctttgaaacacgaggataataaggtttggcctttcaaaatcttaagacatcgagataactatttaataaattttaagtaaaattatattaaaaaatatataattttatatgggtgctagccacgcaattgcgcgggccacccagctagttataattatatgaaagtaaatttaaatgtcaatctaatgacataatttttaacaaataaaatttatttcatattatattaaatgttggtcaaatgttttaaaggttaaatcttaaaatacgtgtatgccttattatgggatggaaggagtaattaaattattaaaagagatacatcagaaaaaaaacatataatattacgtgtgggcatgtaaaatagtgattaaccaatcttttatcacatttttaggtggacttataataaatttttgtacatattttataatacggaacatacgggtggatacatgtctttccgtatcctaacccgtatttttccaacgaatttggattcgaactcggttagtatcgggtattccttttttctcccatattcctcccgcgagtcttgagttgggtgggcggtcgggaaatacccgccccattttcacccctacttgtttcagccttctgatgatcgatcaggccttttatacgcgtcgtccagtgaaacttttatccgtttatggtgagtatttgcgccctccaagcatctccaccgtttttttttaaaaaaaaagatgcatctccaccctgcgtggctgccgcccagctgccacggcgtcgagtttgaggatttggatcaggtgcagtcacaatagtgactgcaacttaatcagtagcattagcaccattggatgcgaactggacagctcagatcgcgaactgtagcactgtagcacgggtactgttcacatggccactgtagctttacatctaaaccgttgatcagaaaaacggatggctggtgttgtgtgcagtgttaacttgcagttacaactgtaactgcaccggatccgaattccgagtttgagtatagccaatttaattagccacacaaccaatgaggggcagggttttaagttttaactgaattttgtttcgaatgcgaaaaatattacacatcaatatattatattagaaggaagaagttttaagcgagtgatatacttatcgattaaggccatatttgtttcagcttaagattattgtaatctagattattaaatcagattactctaagctgtattataataagctgacataaaataagctatgagttgtttgtttctctggattattagaggcatctaagagtagtggatctttagccactcaataatctgaaaaaagctagcttctctagaggagattattggattatagtaatctggcttatatgttataataatctagcataataatctacttgtttgtttcagcttacagttaataatccagattataataatcctaagctgaataaacaggggctaaaactagacacttgttagttgccgtgtttgttgcagcccatcatttctttcctattccttttccagcgaggtcgtttgcaaatatttagacgaaacaaattaaatatagtgatccaattgctcaaaaacagtggttgttgatacaaatcgcgcgctattaggtctgtactatcgtgcgttagtttttttatattttttctgttgtgtagtactgtatagtctgtatggaactagccctttattcagcttcccctaaactgtacttttttgttggcaaaactttttccgtccttgtatttttttttcagactataaatacaaacttttttgaaagaaaaactgcaaatacaaactatatgcactcccacacttatataactatataggactccctatctcatccttttcccctttcacaaagatgtatgcaatttcgtgctttgacaacaattgtgacttggaagcagttatctaactagcagcttttgattattctatatgcgtgttacattaagcacgtttaattggatcgtcactataatagtataatcaatggaggttggagattctgccagctagtagaattttactccttttttttccagaaaaaaaatgaattctgattctgctgaaaaaaaagagggtgttactcatgtcgaaaccatctgttgccaagtggtggtgatcccattctcatcatctacaagagtacggccctgtttaggggagttttagattctgagaagcagctgtttggtagccagcttctgagaatctagaaaagctctgaaacccagcttctccagcttctgccttcttagttcatttttcagaatatgtaactatagattctcagaagctgtggactgtttggggcagcttctagcagaagcagcttttgagaaaagctgcagctgagagaagctcctccaaacagggcctacaagtccgatgagacatccaaagtcacctcgccatcagcgatgccaatgactgtttggtggcgccaccacctaccgatgcgaaggatcatgagacaaaatacgattcaaactaccaacaaatttgcccttttgtgtgacagacttagagagggtataggtaggctgaactgcaacgatgatgtgagcggctattggatggtggcacaggaggacatatcaaggtgggaaagacaaagccaaagtaaaaaaaaatccacatgctggtagcatgggaaatatgatgtgagcggaacaaacgagtatttccaaaatcaggaaaaatccttgccgcagctgctagacaagatacagaatgaaatcaagctatggaaaatatgtggagcaacaaatatcgtgagatttatcggcctaagatgttttgattgattagtagcttttttctttttttttctctgcctctttttcctctcttttcctctttcactgtttggtgatcttgtaaatactccctctataaaaaacgaatctagaaccggatgtgacacattctaataaaatgaatttggacagagatatatccattgtagtactaggatgtgtcacatctagtactaaattgattttttataggacggagggagtactttcttcttccctacttaatataacacctgctttgctggctttagtttcaccaaaaaaaaaaaagcccaatccacacagctaccacgtagcattttcacctatcctcaaattaaacacgttaaaaaataggtttgtcctaacccgataatccatgtccctccaatcaaacgcatgctttcttactcacattaacacaaggattgttggccaatttgaggaatgccacccctcacggattgaaacgaaagagaaatcagctcggacggctagaaatgttcctttacacgaacatggcatggacggtagtgacacgtccgacgccttctatattaatatagattaaccacataacaaatacacacacaacaaatatgcatatttcctttctttgtatgtccagtatgttctttctttgtttcaaggggagttatatgaacaccagccaccaggtctcactgtggcaacaacaaacttctttggttgtgtttgtatatgctgtaaagttgtaaactacagatgttctaactttcagggattggagcatactcatgcggttcttcaacgcgagcaggagaaacagcagcaaccacgacggaagcaccgaatagcacaacaatcaaagccgtgaagttcaccaaaaatgcctctgcgccatatttgtcgagccctgagctttggaggaaagtgagcttctcaagaaatccgagttctgcggtggccagggctaaaatgtagacgaagagcccaaacagtatatgccaaggaagaacacccttcctcacgcttggcgaagcacgggggaagaagaaagcaacaaacccgaatatccactgcaatagacaggcgcattttacaagaagttgtcaacaatcaagtaaagttatatataaaaaaaactctcaccgggcagatatcaactactacaataaaacttcgcagttcaataaatgtgttgtagatctttcagctctgaaaagcaatccattttttcatgtctttcggtggccaggaaattattggtactaacagctactggtgtctgctaacttattcagattcatgagtttttagttgtgaacagcacaacaggatacagagtaatcatttaaccaaacacattcagaaattgatgcaacatcataattgactaaattgtaaaaaaaaaaaaaaaaaaaaaaaactcttctatgtgcatgctttaccagctattttaccagttggttctgttgtaagttgacggtttcagacaaatcataataattggactaagtcaatggcttatatggaatagaattgctgccatatgcaaggggttacctgaataccatacaaacaaattgttccaatcccaagccaagaatgcagactgtagaggttggcaattccactttcattgtgaaatttgaaagcgcagtatatcccaaccgcaccgaatacaagggcaattgcatggagaattagatggatcagcttagttgtatcatgcttccaagtaggaaggaccttgtataccattatagctgccaaaatggagaaggaatattactaaaacttttccacgaaccacagaaataataataataacaacaaaacaacttaccttcactgcctaggattatatagccaataagcataagaacagggtgaacctgcaatgtctcaacattagagatatgggcaaccgatttgaaacgctaatgtacagtagtatcctgaattactagtagtaaggaatatgcaaatgattagaaactgcagaacagaaaagaaccgaatatacagtttaaattttaaaaggtccatttgccgttaagtccaagtttaacgtcttttaaattgggcatgcaaaattaggtggcgcgtttacagaaatgtgtagcaagttgaaatgcaaaatacgattgctttttaacatctttctgtggaccaattgcatttttaacatgacgtcatgacccgcttcatctgatatgaattcaacatcatgcaatcattattcagccctccattttccccatcagatggacaacatgccaatgtgttgaccaacatggatgcatgagcataagagcatccataattcaatacccaacaaaaaacatgccaatgtgttgaccaacatggattcatgagcataagagcatccataattcaataccaaacaaaaaaccaaataaagaatacaccacatggtgcctagttcaataacctactccatcaagcaatcaaacgatccctgattagatgttcaaactgaacgctcaacactttggctaacttaacacatgcagcaaggcctgcaaacttatgaaagtcaacccaattctcattaagtagtcacaaatccgaacaggttagctaaaaaattgcttaactacatacgtatagcggggaaaaaaagcaatcttaacaacaattcatctgttcattcataaccgataacacaacctcgacaggactaaaatttaagcactatcctaatcaccatggcaaaattaacagcaaaaggtaaagcagatgccatcaacatcctgcttttcttgatcaaacgccaaacggatacgacggccaaagtatttttgcgcttccttccttcctaataaagctacctacccctactggatatgactccaaaattttcttttgggaaacaaaaaaagaaaaaacagcggcacccaaaattgtccatccaatccaatatctcgggacggtatcactagaaagataactagagagacggggggcagacgagaatcaagtactcacgttgaagatgaggttcttgtttgtggcctcgaaggcgaggccgccgcggaagtggatgcaccagaccagcaccatggtggcggccgccacggccagcgcgtgcgccacgtacgtgaacggcgccgccctcacgccgagccccatcgcgccccgtctccttcccctcctcgcttcgccgcggccgcgctgtgccgtgccgctgctaccggcggcgggtctcgggtgagtggagaagagaatgccggagcgtagttgtcccccacccccaacgcctcctataattaatactccctccgggaaaaaaaaaacaaaaaacatttaaccgtccgtcttatataaaaattatataaaaaaattaaaaagataaattacgtataaagtattaatcatgtttattatctaacaataataaaaatactaattataaaaaatttcatataagactaaaatgaacagtcaaacgttgaacacgaaaattcagggtttgtctttttttaagacgaaatgagtactagtaaagggatattttggtcttctttaaaaaatccccgtgttgttttcgtgggtttccgatgaggccggaaggtgccaatgtacaccaatcagttgacgccacggctgtatacctattgatttgtaagattgttgtgtatgaaagcatgataattatatttgaaaatggagattagaggtatgtaaaaatatcatatgccttcgttagagtgaaaaggcagcgaagggaaacggaagaatctggtctgatccgtgaccttcgtgtcttcggctccgtgggatttgggaagaaaggaaccggccgccggcggggcccggcatgacaagcgacggcgcgagagaggttggttggtgggaagtactggaatgttcaggcataacaagagttgggattatgcaccacggcattataatgaactgttaaaaaaagtttatatacacatttctcaacaaagggcatttggtctagtggtatgattctcgctttgggtgcgagaggtcccgagttcaattctcggaatgcccccactttttttttcagaatacaaaatcactttttttttcagaatacaaaatcactttttttttcagaatacaaaatgtgttttcttggacattgacaagttctttttttttagtttataaaatgtgttttcttggacattgacaagtttttttttcggtttacaaaatgtgttttcttggacattgacgaggttttcaaaatatacttgtggctacttatttgtattgtaaaatattatgtcaaaatttatatttatactttaaagcatctgcaaaaccgggcaaacataagatagtacgaaaaatgttttttttcaattcaaatgtccacatgatactttcacaaggttacagaatgtgttttcttggacattgacaaggttttcaaaatatatactgacttatattgtaaaatattacatcaaaatttatattgtatttttaaagtatatgcaaaaccgggcaacacataacattgtataatcatgtgatgattaatcttggtgatgaacaattgtcaaaggtgagtgttttaaaaaaaatacagcgaatagtgttttctgttggtgaacagtgcgttggtactatgtggccgaactaactagagggattcaggcggcctgactgggtgacccgatggttagactagaatactttgggttggagtcggttttaagttgttttcatgatttttttagattgcttcatatttataacttctagattgtttctattagtatgtgatactatcgtgtgctgatgtgagttaagttggtgcgaattgtactcaaatacaatttttttattcatgtgcaggtgttgttggagaccataggagtatagccggtgatggatcgggactaggcctgggagaaattaaggtctagacggcaaatgatatcacgtggaatgctcaggctagagaataatgcacctggaggtaaaggtttctatatgatatatacgtggtgttgtgtatgtatgaaaaatgagtcaaatttggattggagttcaagtttgaaaaaattagagtgtggagttgtatgggaatgttgtttttcaggtttcgtaagcttcctatgtgattaggagtcctagttctagttggattcgtggctaggggcagccacgttgtgagtataaatagatgaggaattgagaccggaagatatcaacttttttttttttaaaaaaagaaaagttagggtttgctttgaggtttcgattctagttcgtgagttaagatatgagtgctttagatgcactttataaacatatattagtgtaataaagttgatatattttcaagagttttgtactttcgtcgatacatgtttttttgcataccgacggtttgatcaaagttcattgggtggtctaataagcagcatggcaacgtcaaaccggcatcaatctagctgtgtgattggtgtaatttcattaagtttaactataacttttatttccactaaaagtttagattttcggtgttcgtaccattcatctctctagtaggtttggtttatgtattcgatcctatcaagatagtacagaaaatgtttttttctatacatatgtccacatggtttttgttatgtgtaccatagttaatattccctccatcctaaaatataagaatctaggactaaatggaacatttcctagtactacaaaactagataggcatcttatcatccggtcctaagttattatattttagaacggagggagtaggatagtaacgatgtttaaggttttaaatggttaactctaactccctccgtttaaaaaaaaaacccaattctagatttgaatttggacacacccaggattggatttttttgacggaggaaataagtcctcagacatgttcaaaacaacatgctttcgtgcttccgtgaccggtatgagtacaacagttatttgcagatagtggcaatgattccctaattttcaacaccaacaatatacgtgcttcttaaactgctaaataatatgttttgttaaaaaaaatatagaaaatttgttttaaaaattacattaacattttattcaaatttaaaataattaatatttaattaatcgtgcgcaaatggctcatctcgttttttcatattctcagctgatattaccagcgtctcccctctccagctctccttaaaagagcctctgtctcctaaaggcctaactagaatttgcttgaataatttgctactgcagcccagcacaagcgacgccatacatgcgcgacaaaagatcccaagcgggcctgctgtgctgtgtacagaagcggtctataaacctactgagccatcagagtttgaatgccctcccggctggcccttctccggttgaccgtgtgccgcgccacctggatgcgccgccgccgacggctgccgcccgctactcggccccgctggtgctgtcgcgtcagacccatcgccgcgcacccccaccaccccgccaacatcagcgccaggcgccactccctggccatgcccgggctcccctgccgtctccggagcagcggcgccactcgcgccgggccgacgagagggaaaccgcccgccgcgtcctcggaacgtcccgccgccgccgccgccgcgtactactgcccgcttcgcgatattgcggatcgggccaaccgcggacgagcgcgatgcctggaacccatgctgcgggtgcgggccttcgtgccacgggtgtccgcgcggcggcggccactggcgttgttggtagccctgaaatggcgcgtgcggcggaggaggcgggtggcggccctgcagcagcgcgtccgggggcagctcgccgatgttcacgaggtactccgcggcgaggcggccggctcgcagcagcacctcgtccctctgctgcggcgtcatgacgacgtgcggcggcgcggccgctgccgggtggtggtggttccgtggggcgttgggtccggtactccctcggcggaagcccgcgccgtggttgttgctgtagcgaccgaacggtgccgcgttgttgccacgggggttttggcctccgggcttcattgcctcgacgatggcgaccgagatgggtttacgcagacaagaagaacgacagcgcggcacgatcgaactcgggaattgatcgcggggcgctggtgattgataaaggcgctggtgattgatcgagtccgtgttagatacggggcctcggagtccatcttagagaatgtatcggacaccaattctgagcctcccatgtatgaaatcgttgctagtatatttgaggaattcaaaattggaataagttcactttgtgaccctcaaaagcgatcgaaatctaatctgtgaccctaaaccacaaaccggatatcttgacccccccccaactcttaaaaccggtgcaatttgactccctcggcggtttctcctacgtggcggttttcaccgggtctcctttacatgtggcgttgacatagcgcttaggtggcattaaaaataaaaatatgtgtgtgagacccatttgtcattcaccaaaaatatgggtgggacccacataaatcatcctccccctctctctctttctcttcccttcggcgagccgcgagcgtgtgacgacggcggcggcgggcaggagccggcagcgacgggcgagagccgccggcggcggcggctgtgggccagagcggcggcggcagaccgaagatggacggagagcgacagaggtaggctcggcccattccaccccggcgacgaggtcccgacgatttctcttcccattcggttggcggtggcggtggcggcaggcccagctcccgcccgtcgccgtcgatggccgccgcatctaccgctctcgccggccctcggccgcccgcccgccgatggttgtcgtcccgtccccactgcccgtcgatggccgccgcatctaccgccctcgccgtccccgccgtcgctccagctcccgcccggcgcccgacccatggtgccatcgtcagctccctccgtcattcacggcgccgccgagaggacagagcctatcctcacctccaccggcacagcgccctcactaggggacaagctccctcacggcgccgccgctattcctgaccgccggccgccgccgccactactcacgaccaccggacgccgccgccgctactcccgaccgccggatgccgccgccgctactcccgaccgccggacgccgccgccatccccactgccactccggtggtgaagagaggcggggggagagaatgagagaagggagagagggaggaggaagaaggggaggagagaggacgacatgtgggccccacatgtcatcctctgtgtgaatgataaatgaattatttttttatttttaatgccacctaagcgccacgtcaacgccacgtgtaaaggagacccggtcaaaaccgccacgtcagcaaaatcaccctccaaaaccgccgagggagtcaaagtgtaccggttttaagagttggaggggggggagggggggagtcaagataaccggttttatggtttagggtcacggattagatttcgatcacttttgagggtcacgaagtgaacttattccttcaaaatttccccttcttccataacgactgaagttccttactgggcctctagcttttgaagccattcttttcaaatctcacggtagacagggaagccctctttttctggcgtaaaatggccttgccccgtaatacaaatgatgcaccatatgtttattataggagctttgccactgatcggaaacgatttggtacattatactggaccagagcaaatctcttattatggttgcctcggatgtcctgtaaagagaagtccacacccgcaaaaaatcatcgacatgcgggctacagcctacagtacatggaataagtatgcacatccgtgtaaaatatgggttgacatttcacagataaatggagtgcactgcaccccagaaataccctttttatcgtaagctttttctttgtttgaacgaaaggacacaagctatgcctattgcaccaaagagtaataaagaggataaaatagaagtttacaagcagaagggaagaaggaagcaacacaaaaacgaaaaactcatgcaaactacgctagaaaatatcctccaggcaatgtcttgtgactaaaggcactggtctcgaaaagttagcctattcaatataccatttaacctataccgccagtgcttttgaatgcatgagcggcttttaggtgtaaatcacttctttacgtaagttaagagtttagacatatcttcatggaatatctttacaaaataaaacaccagcaacttaaatttgaggatacagggacagggagcttatctgacctgacatgaaaatctacgtactttcctctcgaaatctatttgaggatagggcacagggagcttatctgacctgacatgataatctacgtaccttcctctcggaatcttttccggaagccacacccaacaccagggctgttctggtttcgccagaccagcttgctctgtttttccttcccatatgtaacaaatgaaagtttctgcacaaaattattcaggttttatcttcattgcatctcaaacactagaaaattcacaatatcagaaaatgtttcagcacgtacctgtcttgctctcttgtcaataggagtccatgttggatcaatggacggttctatcctctttttgtgacttgttggttgtacattgaaatctttccttgctctgcgattctgtgctttagctccttccttgcctttcccataatgctgagtcccaattgaagggctctggtccctcgaaggagtgtctctatctcctcggtatctgaaggattctttaggtggaggatttagaatctttgagttgctatctctcattcttgggatcgacatacctggtgaattactacatctagatctctcctgacgtgcttttctctttgcactcatttgccttagataatcaatttcccagcatgacccctgtgaagttgcatggctaccaaaatctagtttctgaaaagcaagcgaacttgctggatgttgcataatttcatctcttggttcatgatatctgttgtccatatcatatctgtaagagtcgtctacagtacctccatgtgcaagccccttccatgtttgttttgtacctcctgaaatgttccactcaccaggatcatcgttgatctcaaatgcagttgaaaatactggattgctatgagttctgctgcaagatggtctgcttgtgtgaaaagtgcttttgcttggatgcgtaccaccaaattcaggttgccagggtaagtcgaatgtgtccaccatattgccagtccttctgttatatgcttgattatttggtgtcaatccattgctgaaatcatcattaatgacttgattaccaggtattgcatccacatcatgcttcttttgttgataagagaatccctcacttctcatattcaaactttcgtcgaatgtaaagacatctgggagctcgggaattgtattatccatgtcagagaacttcctcaacttagaaggtgagaatacctcagcatgttctgcatagtcaccaggtatttggtttagagaatcagaaaagaggagcttattagttggtactgcacaagcctgcaatgaacgctgtttccttttcctcggagactgcaggaatgcactactgatatctgaatcgactgaagagcattcagtcattacagaccttgattcacctaactcaccaaatttgcacaaagcattaaatagggaaatgatctttggagacaaaagatactttccaactgcttgaatacggcgctcatgtggccaactgaggaactccacaaggctgcctccagaagaaagtaacatatatgcagacacgggattgatggaagggaaacttgtgagaaatgattcagccaggctttctgattcaggtatatctggaagaggagctttataacagctagtcacatttgtaatgcaattgagaattatttcatctgttgacctgggtgtgtgtgagaagaacagctgcaagttcatgtccaaactagcagctgcagtatacaatgaatcagatgagtccattacagcagaaaggaagtcagcttctccctcaaagacctgcaaaagtacaaggaaactgttctcttatgatagatcaagaattatcacattcacaccaaaccaaaacagacaggtgcatttgcatcaataacatagcaatggcctgtgatgctaactatatacgaaaaagtaaatacttctagagggatacaaaattaattaccatgatgcagccagtgaaagagaaactaactgacatcagaatgttggtcgcaatattctctacattttcttttataccagatgtctctgctgatgttgttagttcattggcctcaaagagcgcagtctcataccatactaggcagacagcagcactgagtatcagatccacaggcagatcaatatctcgctccacgacctgcattcctcctttctccagagctagtatctgctgataagatgatcttcgcgaaacaagcatcgtctttccatgatttccagtatttacaactatcactacatctgggacggacagtcttcctggcatgatgcagtcatttttcacacaggaaggtaagtcagtagtggactgattctcttgagggtctttcagcacattggcagatacagaagaagtagagctactcttctcaactgtgggtacacattgtgaattgacaacaggtttattactcagtgtttgctgtatatgtagctgttcatcagcaagcacaacgttatgtgaatcaaaagtattcttcttgttaagattttgtaatctgtgtggttgatcatctggaagcagttcttttgtagcatcagcagcaaaatgtttgctccgtttttcttgaagaccttgcagttgatttgttgctggtatgaagtttaacgaatcaacaatacgcattttattcatcctctcctgcaaatccttctgaagtgtaagcaaaactttatcctgcaaatagtgaagcattcttaggaagttaggatgttccatgttgatcatttgctacaaacacctactgccctattactaagtgtaggccctcaaaaacaaatatgtggggaaaaaactcatttgtatggttttccctctaacaagatcatgcaggaaactcatgctcaattgaagtactcaactacaatggatagaagttatgattacagagctgagactaagtgtttcatattacaatgagctgtgtgtacaagatataaaaattttcatgtagtgcccccctccccaacacatacaaaggctggcttaataataaacaacatgattggcatatgacaacagaataaatggcagcatggagtgagtgataatcaccaatgtagatttcaaatcctggtctttatggttgtcctcgactagagcagctggaaagtccttgccatcaactttgacatagaggaaatgcagaggtggcaaaccatctaatttaggagcgagagataacaaggtagatgatttattcgggcctccatattccagtatgatgccaaacttgtcaaaagggaatgaagctggaatgttccttcaaaatgatgacaagaatggatatggcataatatttaatatcagacaagcaaaaactaaactgtgcatagaaacaatttttttgacaaaaagagccaatgaacttctggtacatttaagttattgtaaaaaagaccccaaaaatatgtctaaactctaaccacagttgatcaacaatatgaacaaccagtgcaagatgactcagtggctcacaaggcaattgatccttcttaaagggcaagctacttctaaaaacatgatcgtcttgtaatatgtccatgactccatgcactaagaaatgaaagttgtggcaaacatggagggactgttaatgtaacacattcatttagctcaccagaatgaattcaataaatcctgcactaattcttgtacagtagaaaaaggtacagcaaataactagctaacccccaagaaccagcctatctgcttgttgaagttgatttgtaataagaaaatgaaaagcaaggaattggaaagaaaattggcttggtttatttatcaaatggacttacttgttatctagcagaatgcaatctgatttcagtaattcttccagcacccaagctgtagagtttgtcttgttcaccagatccacaaaagttgttgcagggttttgtccaaactcaacaaatgtcatcctcatggatgctagcttttgacccagtggcagccagaaagctctatcagcaactataaggatcttttggtcgatttgtttattagatctcaggatagtctcaatgcatgacaatgacggatgagattcaaacagttgcctctcagatttcctctgtgcttcagaaatggaccatagaatatgttttaacctctcaggagtgttttccaagcttctagtcaggttgctaatgtacaaatgggccgcatgcagaccaaagaaacataagtaatatgcaacctgctttaatgcatacagtacaatgagttccatcttatctttgtgttcgcagtgattgtacgagccttctgaaccttctcccgttatcagttcaagaagtttctgctttgagattcctaaaccttgctcatctgagaaagaatgcctccaatatgtgctttcttgcagagcagatgtatagcttgcatggatttgttctataaggccttgaataagatttgaggggctgacaggatgaatttctatgagtttgtcaaccttagccctggttgaaagagataatgcttgctcttctgaatgcgggacatctaaagtagaagtattctcattattggttccactcttagtggcacttctgacgtttaagtaaaaatttaggtcaccagaatgtgatattaactcagggaaggaagatgacttttctggactcggtcttttcatggaactatggtttctagtaccaccttcttgttcgcatttttgagttgcttccaatttttgtggatcatgagacagtggggcaggaacataaatatcgctatgtttatcctcatcttgaagctttggacttctctgaaaatcctccagaaaatcgctaacaaatactgatgtactctgacaactcctttgcagctcagaacttaaatggcaagtttttgcctcctcaaccatgcttgcataagaacaacaaatctcccggttgcatggtccttccagtaagagatgccaatccaaataaattccatcagatgctgatagagggtgtggttttagggagcatagtatttcttgaatgggagggaccctagacctaactgctatatcatcatttaaaataggtgtaggcaatgacctaaatgtatcatcaaccagtgctaactcgcagctaaccattgattcatacaaacgtcttgctggatcaaaatcatctttgaatatttcatcagatatattcatcttatttgtctctgactgaacaagcattttgaatacattatctgaaggaaaatcaatgatctgtacctcctctaaaagaatggagcaaggcaagtctgaacaggtgccatcaggcttgagagggtagagtgctgaatttttctcaagcagaatattgccattgatcctcacaacatccatttctactgcagctttgatttctgctggtttatctacttgaatgtcatggcatggtgcatcttcacaaacaaaggtcagcatgtccatgtcagttgatctcaagaactcggttgatttaaacactgaatgctgaatctgtgcttcatccaagtgtctaacaacattatcaaaaacaccgtatctgtcagtctcagtcagacaatcgtcgagctcccaagaattcctacttacttccaatcgaggtattactgcaccatgatctagtgctgcaatctccaagcagcagtcttctctcagagaagaatggccattgccatcattgtcttttacagggaccttttctacttgatacactgactctggaagatcagattgatatcttatttttatgtcggtctcaatatcaatgaaatcctgtgagaaacagagacgagaacgtgagcatgatgtatcaaagaatatgtttgagttaataaaacacaagggaatcaaatcaacatgttcaccagcaggcataagcaacttcaactgatttatgtttttgcaactttgatggtatgatagtgatagttacataatacagaaatatgacagggaggatacaaatattactagtgaatccacaattaacacaaaaggtaggagataaccgcttatcatgttattgtgtagaagtatatattttgggtgatgcgcgcattacaatcgaaatacaacatggtataagaacggaagtatcataaccatttaactctaagtacaacatgttcatatgtctcccatagctgaactgcagctccatgcgcattattgatcttttgggagtatagaggagcgaattatttgatattgtgatgagatgatgtagttaccaaatggattttcatatctggaacacgaagcaacaacgtgacaccaccaccagactcctcttcaccaaaggatgcaatgtcttcttgcaaagccttagacaccagaacaatcgagtttgaatttgaaaaggaaacaacataataatatcaaccaatatcactgaaacgctgctcaccattaggagatccacctctacaacctcaaatctaagctccttcaattgttcccacctctagcaccacataatgcataaatcgaacatcaattccctaagaacagtcaaagcatgtacaaggctagcaaactaactactatgtcaccttcataactgaggagatctccagaccgtctgatctagagccctcccccttttcatccttctcgcggttgatcacgccatacccctatagaaaaacaaaaaagtgttcgcaaatgctccataggaaattcagcctacagaatccaaacataaaaacttcacttgccttagggattctgaatgcaccaaactcccatgagctgaaatcctcgccgtatccgcctctgtcgtacaggaagtcgtccaatacctgcgtgaagcagaatctagcagatgagctgttgcaactcacagatgccacacgattttctcacatagaaatatcaatcaaccaaaaacagcacagagcaagcaacagcaaccccgagccacccccaaccaagccccgcacgactcgagaacgcgaaacccgaattcgcaggtggctcgctcacctcgtcggccgcgggcacagtcggcacaggcagggcctgcgggataaccgcggcgaggaaatcggagagcgcggaggcgatggggagagggccgagaccatcgtcggcgaccgtggcggctgggagttcgtcggcggaggtgaacgggaggaagtggggatcgggaggaagggcggggacggggagagaggggaagctgaagaactctagggctagcgctttgccggcggcggaggaggaggacggcgcgaagtagtcggtggcgaggaagcgggtcctcatggcgaatggcgcggcggagaacgaagcgaggggagcaggaggttgaagacgaattttttggttttcaaaatgttttgatacgccaacttttgatcttggcttgcggaatgcggagttgcggtgggtttccgctgcattgccttgtgtgttctactaaaaaaaaatgtgtgctcttaattagccgtttctaaagtgtaggaatccgtttcagaaactgggcctaggattaatgggccggggtggtggtgccattatggtcgacgtgaacactcgtgtttcgtccgggaaaaagtccactgtgacttcctcaaaatatatatagctccaatctaatttatattcttaaaccgcaataccggatatcttgattctctcaattattaaaaccattataatttgaatatctcaatggttttggaggatggttttactgatttggcactttgacttggtataacctgttaaatcatcttgtgagaccctcctgttaatgaccctttttatttcttgttttccttccctttcacctctcacctgttaggagggcaggcagcgatgccctcctccctcccccacccaaccctagacatgtcagtggccaaaaccggcaagtcctcgttgcggtggtcgagggggattgaagggttgaagtgaggagggaaagggacggaagacaacaaaaaaaaagttacataggatgactcaatagtttggaccaagtcaaaaacgccaagtcagcgaaaccgtcctctaaaaccgttaagggagtcaaattacacagttttagtagttgagatagtcaagatatccgatattgcggtacatggatatgaattagattgaagctatatttgaggccatcaaagtggacttgttcctcgtcccgaaagcgagtcgtgagcgtgatcgccaacacggcccatttcaaggcgacgtggtgcggctcttcaacatttgggatggcgtcttcgaccatctccacagcacaatggtagtactacctcttctgttccaaaatataacaacatatctttatcaaaatataataaattttaagtgaacacatgacactaggatgtgtctcattcgttaaagggctgctatattttaaaatggatgtagtagctcataatttgatctgtgcattctttttttttgtacaaatacaaattttgatttgatttgttcattcatcttgttagtattaatttggtttgatcatggacaccaagtcatcaaagcctctgtttagcaatggccgggccgccggggctcacgtgctcgttggatcgatccgaagattcctcgtcaaaatttacaatactactactactccgtgtcagagtcaaaagactcaaaacgcctcctcgtatcgtggattcgtggtacaggggctccccttcctctcagtgcgcccgcggcctccgggtggcctccagaatccatatcaggtgcgtctcccactcgcagctccaacaaactccccgcatgtcgagcatttccctctccatcgatccagtatccccagttcccaactactagtttctttcagttgcagcgcgcgatctcgtcactctggtgaccatctgacaagttctcggcacgtcgcggccgggtggatttcgcatgcgcgcctgacgaattcttctcgtgaagcagggcatcgatcgccgggggcgatcagatcacccggtgaggtcgagctccgatcgctcgagtggcgttgccggccagcctggagtcgccggtgaacggcggcagcagagaaccttcagcgtaaaaaggtttgtccttctcgtacaacccgctcgattcttcgtgttcggttccagcgtcgtcggatgggttaaaccacactgaaaactcctgtgccgttgaaggggacacaggacttaaatccagtacggttatcagcatgcccacgtccacgtagtgacgtgaaacaaaaaccaacacaaactcgttcgcacacgtggacgcgccctcctgagcgatcggcgcgagcgtttttaacgctctccagcgatcgactgccgtgcagcactccctcccgcatccagtgctgtgctcaccgtgttgtttcgtctcaggagcagaaggccaattcaaccagccaaccagaggctgatctcgccgaggaagcggcggcgaacaacgctcggaccgcgtcaacgatcgagaaggcagaggagggggagggaggtgcgggcgggcggcgggtgggaggggcggcgatggcttcggcagccgccgtcttcccggacggccggcggtggtgcaagggcgggagctcgtcgtcgtcgccggtgaccaccgccatcttcctcttcttcttcgtcgtcgtggttggcgtcctcgtgtccgcccgttggatcaccaccaccgtgagttcggagttttctttgttttttcttcgttttcgaaatttcagtcgagcattcatggcgatggcgattcatcaatgtttatctgacactagttattttattggcatgagcgcagagtcatctgtcgatcaccaatctggatgagtggcgcacaaagacggtaggtaagctccatccttttgttcgatcgaaaattgtgaaacttaggtagtgtttggttgcaaggatgggatgggatgggatgggacgaacccacttttaggggtgtttggtttaggggtgggtgggatgggttggtccctggagaggaatattcctctcagatccgggaccaaccgatccgccaaaaactggcggacaaactcgtcccacctgggacgagcgacggcgtcaccgcgccatccaccaccttcgcgagctccgtcgggcgcccacgagcgtcgccgcctcgtccacacccgccgccacctccgcacgtccttctccgccgccgccgcctccttgagcgccgccgcctctgcctcgtccgcgaccgccgccgcctccatgagcgccgccgcttgcccgcgaccaccacctccgcgcgtccacgagcgccgcctcgcctccacggccgccgccgccacctccacgagtgccgccgctcatccgcgaccgccacctccgctagcaccgccgccgctccactcagatccagccgccgcctcgcctccgcgcccggcgcctcctccgcttcgtccatgactgccgccacctccacgagcaccgtgaccgccatctccacaaactccgccacctctgcctcgtctacgaccgccgccgccaccttcgcaagcgccgccgccggtcctctcagatccgggcgccgccgagtgcctccgcccctagacggcactaacggtgagtacaaatccgtccatcccatcccacctcaatcccttctaccaaacaaaaaactataaccatcccataccataaaccaaacagacaactggaaccatcccatcccacaaaactaggataggtctgacccatcccacttcgtccccaaaccaaacactaccttagcgaattctactccttaccattttactctttcctagagtgacaaatcagggtgcatttttatcatgtttgcaaaccagaaattcttcctacaatgaaatatctgcggttgcataaacagatttacaggattgatccattctgcatgtctttttacaagagagtaaaatttttcagcattttttcatgtctttagatgtcagcattttttagtagtatatagtacaacataacatgatttaccatacaatcaaacaataactgcattgttctctttttattttcctcaacaaacttctaacaatatgaacttctctagatatatgtttgcaatctttagacttatatacaaatatggcctaaaagtaactgattgtagcttatttgaagtaataaaggccagaatgaattccgttacctagaaggagagtaaattttgcaaaactataaaaactttcgatgaaactatattacaaaactattaaattccagcagcggcctaacaaaacaataatgcaccaaattattaggatactacatatgtaaattacgatatcacaaaactatatatttccgcgtaaattcaccataaaacttcaaattcggaggttatagatctcttgcgttattgccaattggatttcaaaatttatgattttgcgatactatgatttataaagttgtagtgtagtttttattactgctccctcggtttcagattataagatgttttgactttagttaaagtcaaactgcttcaaatttaactaaatttatagataaatatagtaatatttatattaccaaattagttttattaaatcaataattaaatatatttttataataaatttatctttggtaaaaaaatattactattttattctaaaaacttggtcaaacttgaagtagtttgactttgaccaaactcaaaaacatcttataacctgaaaaaaaaaagagggagtagttaatttgatgctatataggcatgtaattttacaatatcataccttaaatatgtacatacttaagttttgtgataataattttattattaggaaacactactggagtaatttctgaaatttactctgtttgcgattatttgcaattttattatctcaactcatattcttccttcccctgcaggcaatcctgacctccacgcaggccacatccatcccgggcacccccaccgcgccgccgccgccgcgccgggcctactccatctcctgctcgtcgccgcctctccgccgcgaccccgccgtcccgaagaacatctcccagacgctctacctcgcgctatcctcccgcccagcctgcgcccgcgtccccgagccccagccactcccccctaccaccaccaactcctcctgcccggcctacttccgcttcatccacgaggacctccacccatggcgagccgcgggcgggatcacccgcaggatgctcgagcgcgccagggacacggccaacttccgcctcgtcgtgctccggggccgcgcctacgtcgagcgcatcgcgccggccttccagacccgcgacctcttcaccatctggggcatcctccagctgctccgccggtaccccggccgcgtccccgacctcgacctcatgttcgactgcgtcgactggcccgtcgtccaagccgatcggtaccagggggagaacgccaccgccatgccgccgctcttccggtactgtggcgacgacgagacgctcgacgtcgtcttcccggactggtccttctggggttggttagtctacttctcctggtcttcacatcattgtatttttcttgatggagtgcttgcagattaacattatattctactggttaacattagaatgaatcccaatatcccacaatcaaatcacaggttatttcctatgctgttattgctacgctactgttactagaagtagcacaatgattgtgttcttcatgatagtcaggtccagtaagcataccatcagtgtgcattgtgggaggatgcacatgtttatgtctgctgctgtgtttctgacacagtaaatatatgtgcttgaccattgcagtgcttagattaaagatcattcctaagactgcaccaaaattaagtatgttctttttacgctttcattcggacaaagcaccagagcttaaatagactgtctgtgatgataggccagagatcaacataaagccgtgggatgcactgcagaaggatttggatattggcaataagagggtgaaatgggtggatagagagccttatgcttactggaaagggaatccagatgttgcaactaaaagaaaagagctggttaagtgtaatgtctccagtaagcatgagtggaatgcacgaatttacaaacaggcaagtatttgtgcctatgatttactgtgcctagtcgcacttcaattaagtttaatagtcccctgttctcgcaagtttagtccttcatattccttttaaaagaataattatattttagtatgtgagttatttatcaagaaaacagttatgatgatgtttatgattgattagctattttgcgcatgtttctcatatacaggattggatcaaagagagtaaggcaggatacaaacagtcagatttggctagtcaatgcacacacaggtgtgttttcttttgttaaaaggaatataagagtcattttgctttgttgacagtactgaccattgtgtttggtgacaggtacaagatctacattgaaggatcagcatggtcagtcagtgagaagtacattctagcgtgtaattcaatgacactggttgttacaccaaaatactatgatttcttttcaagggtgctgatgcccactcagcattattggccagttcgagatgacaataagtgcagctccataaagcacgctgttgactggggcaattcaaacaagaaaaaggtatcatcttttatataacatttaaatatcaagcaacaaagttatgtggcactagatatcagttttgatcatgattggctatttctatgagctgaaacacattggtcaacaactattaatttgagctgaaactccatattcacaaactacttcgtgtgatatgctcaccctgatagtgtgggaatcttttgcaagataaaaaatttaaagcttctaatgttctatagaaagtgatgcccttcctttatctatttaatataagcacattgatggagctgtaaataattgcattgtttttctcgtgtatttcatctgaaagttttgtgcaataaccaaagcattgatgaactaatattcaaaactcgaaattatttcttgatgggaagttatcaaccgtagatcttaatccgtgctgacttgtccaatatttagtgaactagaaatttttacttgtcttttcattagtaatgatcatgtttggagtcaaaggttacatttttctataacatagaatattttaccatatcgtcctgtgatagtaatatttatatgaaaagcatactctcatatctcccttctaaaaactgttgaaggcacaaaaaataggaaagcaagcaagcaacttcattcaacaagagcttagtatggactatatatacgattacatgtttcacctgttaactgagtatgctaagctcctacggttcaagcctaccaaaccacctgaagctattgagatctgtccagagttattggcatgccaagctataggccgtgaaaggaagtttatggaggactctatggttaagtctgccaacgatgcaggcccatgtgatctgccacctccattcagccctgaggaattcaaagaattacaacagaggaaagagaagtcaatgaagcaggtggaaacatggcagcaaaaggcttcgcaaacctgaggatagcaagcattgagagttcactgtttttcctttcctaacgacatgcatataaagttttggtcaattatttagggtcaatggtctatacacatattctgtagtggtaataatcaagagtttttcttattcgattgaatcaaatgcataacatctatagaacttacaaatggttctaattctctcctaacaacccccccccccccccccccctccaaaaacaaaaggaaaaaaaacacccttcatgcttgttaaggaaatttttacttctaactgtcattttttatactttgtttgagctggaaagaaagaaaggattttgaatcccactggaacagtattcctgaaagtttttaccggtcattttgtaccaattttatgagaaacaaaattgctatgaaattcttagatcatactttctataataattaattatttgaggaaatttatgattaagggcatgtttggggagattctagctgttgcagcttctcccagaatcagaagatcccttaaacagtcagttttttatccagattatgagaagctgtagttgtagaatccagaaaatgaattagaagccagaagctgggtagattatgagaagctgtagttgtagaatccagaaaatgaattagaagctagaagctgggaaacctagctactccatattttcagaagctagctaccaactagttactctcagaatgttaagctttccccaaacaggccctaagtacagcatatcctagccgcccctttctcaagggaaatggcgcaaggctaaaattagaccgttttatttgtcttgccctgtccatagaagtctttaattttagctgccttagcggcttcaaaaatgactcactatgtccataaaagactttaattttagctaggcatattaagtaagatattaaaagatcaatatgacattcattaatatggagagaaaacaagaagcagaggcaaataaggacataaaggaagtgtaacgccccgatttccgcgtggcgttaaaagctaattcaccgaaaaccctaattgcgaaagttttgattcttttgagtgatgagtctaagttgtgccaaagatcacaattaaaatccctcaaatgtctcgataccctgttatcaaagatcgtctccacaaaatttccatcctaatataatcccgaagtttgatcccttctattcggagttccgtcctgaaaccccacccgtgaactttgtcgaatgtccgaaccctaacccactccaatgattcacctccgattcctaaactctctcattagttccttcaaaccgattctcaaatccgaattcaatctctcaggttttgattcatctatctttctctctttatcggttcgtcaatctacccttgttttccttctcgaacttctgacccaagtctgaatatgcaaatcgagaccacttccacccttgaactctaaaccccaaggttcaatccctttcgccttgagttcttcccaaaaggatatccgttccgaaataatctcgaagtccgaacccttctattcagacttctcttctaaatcccttacccgcatatcccgtcgagtagtcaaactcaagctcccaagttacaatttctttctctaaattatccatctccctttgactcgtctctgaatattgttcccttccttgactcctttctattctcccgagaccgagtatcaacttcgaattcgaatccagactccagccctaaaacctctccaattaaacctctctgtgaacgtctaatttaccccccccccatggtggtggattcccttctttcatttcctcccaggtccacctcttcctactcttccggcccatatctctctccctctaaagtctagacctatcaaatctacctatttatttcgcccctctctctacatcgatctacctagcgatctatctatcgatcgatcgatccatttatctatctactatacctacctatctgtttacctatccatccgtcaatccatctgtctatccgtccctctacctatcgacctatctctctgtccatctatctatctatctttgaactctttcccaaacaattgtcccaactccaagaatactaggttccttttgaatccctctcaaataactcttgagccgccaaacacagaaatattccagaaatatataattcccgcctttgaagcccttccatgacacccccatatttgccaggatcatatatccgattggaatccaattcccgactcaaatgctcctcaaattccttaaagaaattcccccgaaagtctatttcacctccctcttggtcgttgggccgtttttccctttgccggcccatctccacctctcggccgctcctcctcccccgcacgtgcgttgcacgcgactgagtcgaaagagagcgccgctctctccctctctctcggtttctctctctctctccctcgatcgatcgatgccgtccctctctctctatttctttctctctctctctctctcacgcgccgacgctgatttcccaccaacatcgctcaaacctccaccgccttcgcccgttcccgcgcgctcgcgcgtggccgaccgcccggccgccgccgcgtcagccctggtcccgccactagccaccaaagcttggaggcagagaagctcgcctcgtctgccgcatctcctcaaaatgggaaaagcaaaaccccccctttccactgcctcgtcctccctttttccttcccgagctcgaccgctctccccctgtcctcgtctctttgcacgcagaggcagagcgccgctgatgatgccgcagcagcttgcgcccccactttggccacactgcgcaaatcctcccgccctcgcgatttgattctcgccgtccaacccaccgcctccaccgcgccctttgcatctacgccgtcgctcgttctcgcgccgctcgtgactgcagccgagcgctcgaccaccaagtcggtttccccctccctaaaccgacctcgcctccgctataaaaacccgagcccctcccatcgccctctctcgttgtctcgcctcctctgcatgccgcaccattgccgccttgacctctcgtcgtcgccgtcgcgcgtgctggtgaagccggcgtgcgcgcggggagcggaagaggactccgggcgccatcccttcttccccttccccggcccgaggccggagagctctcccgcgccgccgccgctcgtcacggcgccctgtcccgacgcggtagccctccgttcctcttcctcgctcaccctctccctcctatagctcgcacagtagctcggatagccctccggtagttcgtagaagcccccccaagccccgcagccgcctggcatggcctcgccgccattgccgcccgctcccgggggccgccgccgtcgccagccctcctcggtgcctctcctccccatccggcgcctgaaacggattccccgagccccatagatactcccaccgccttgaatcgaatcctcatcgcccctccgccgtttcccccttttctcgtcgccggcgtgcgccgccgcgattcgtcgtcaccggcccctcttcgaaggatccgatccgttggctcatcccctctcgtgctcccctttgtaccggtgaactccctctcgatcgaatctccgcgtcgtgcttcggtgaagccccgccgtcagccgccgttggttggagctcctgtgcatcttcctcctctcgcgcggcccgcgtggctgccacgtaggcgccacgtcggtgccaccttggcaagaccgagtcaaggcagcccagtcagcctccccctccgtccctttcccctgtgcgcgcggtccacgacaagtcgagcggctgcaagtaggcccgccgcactcccgtccacaccggcgcaccacccaaaccgcgtccacccaaaccctagcgtcgcatcccgcgtgcaccccttccaccgtgaaccttgccgccgacaagcaggccccgcccgggaccccgcgcggtggaccgcgtacacccggtcgaactccccctcccacgcgcccctaatggaccgatcacccgcgcccgcaccggcccaatggcctgaccgcactgcgcatgaccccttgggccgcgcctaagccgcccgaggaagtctaaatgacatccctcctatccttttcttttccaagggatttaatataaccttttccctttgttccataaatcaattccttattccaaaattccataaaccatttcctttggtccagcacgtcagtgactgtcaataatgttcttgagaatattatttctataaattccataaaccatttctctattctagaaattccatttaaacttccgaaattcatatctctcaatccgtagcttcgattgactccgttcaacttccagtaattccgtaaaattgagatctatctaatggtactattaattagtctaaataggatctttcttttggtcttttgtttaggttttcgattgtttgcgtatagttgcggttgcggatttttgtcgatcagggatttctcgaagattcgtgagatcaagaccctgagcaaggcaagccacctttgaacatcttgagcctataattgaacttaattatattgcttgcaaaatattatgcattgataggattgcacataatatgtttgccccgtctgcgaggcagatcagtgggcatacctaacttgttgcatttgatccttccattgttaaattgttatatcatgtttccttgtaaccacctggtcgagcctcggtattcgtgcactcggtgcgagtatcgacggtcgccgtcaaacttaaaatatggtaaacatcttgggtaaaacttggtttacaaaacgattggaaaacccgacgcctggatcggtgccttgtgaaagaaattgagatttaaaaataaaaatcgtgacacaaggccattcctgggcggaatgcttgtgcggtcgcatttaaggaccgattccttcataattacatccgagcatataatagtgcaaccacatgggtggagtgggacacccctggctgagtaattagctaatcaggggagccttgatgccgagagacaagtggattcgccggggtagtgtcggggaggacccctaggcttcctggcacagtatggtctgggacctaacctgttgttggtctgggacccttctcgtcggcatatggtaaacctgtgttggctttggaaatgccttgtcatgaaagcttggaggtctcccgacgtggctgatccccacaggctgggtgatccgggttagtaatgtcatgtgggtaaagtgtaccccctctgcagaggttaacaaactgttcgaacaaccgtgctcacggtcatggacggatgtgaggtgattccttagcgtagtttttcgttttacccagttttatgaaaaagtgataaggtttgggaaacccgatatttggaaggcaagtggctgtcagggagacagcgggacagggagtccctaaaagtgactggttgtttggagacaaccaaaactctgaaagtctagaaaattggtttggtttgggaaaccagctttgaggccaactctgggagttgtgcaaatcttgataaaataatattgttcactcctcacccccggccgagttgagacttgtcttgctctggtcgcggaatgcacacacttagattgtcaaaatgcttgcaaataaaactgattgaaaaataacagccttcccttgaagcttgcattaaccacctaagttcccctggcttgttgagtacgtaagtactcacccttgctctctatataaacatagttctgccagctctgaagatgaagttgaagcaaagattagggtttcatcctagttcccagccttcgcctgtggtgttgggtgttagaccgttggttccgctgctgctgttgttgttgttggtgtttcctcgtccgcgtcgtcggttgtattctcgggctgttctgagctgtaacctaagttaaggtaaataagtcctctatttaatttaaggattgcaatgattcatatttatcaccgtgggtaccagcgctatatcctaggactggtactgagattgcggtttcgtaggaagcggttcgcaccgtttttcctacgacacgctcctgtcaggtgccgttgtacgacggtaccgaattggggtgtgacaggaagtaccattggttcgatggctaaaataaaaagaaaaagatcaagtagtatttaacggatttaatgaacaaattttcaagcttaagagagtttttagggaccgatggagtatagaggtatattcaaccgcttcaattaggatcatggttttttttacctacttcattggattattgttacaaattatatgttccatgcttctaaacatatgttattttttagactactcgtggcgtcgctgcccaggcgccaacttgtgtgcgtgccaatttgtattgatctgcgtgttcaccttcatttcttttctctagtaataaatattaagttcctgcttgttatccatttatttgttttaaaataatgttttttgtgaaaaaatgttcttctatttgttaaatttatttattaaaatatttaatttattctctataacatagataattcgacacaataatcggatggctagtctattttaagtggaaaatctaggtatagcatagaaagccactccttccatccgttctaaaatataatcgtttataacatttgaaatttgtactataaaaatataagagcaagtataataaagagttataagaaagctgaatgctgagctggatgagagaggagaggagagatattagaagcggactgtaagtttacagccggcttaggcacatgaacaaaaaaaaaatatgtgagacagacaggtggaccatgtatgatggttcccaacctctccttctcgatttccgcgcgcacgcttttcaaactactattttgatgtgttttttataaaaagtttctatacaaaagttgcttaaaaaaatcatattgttccattttcgaaaaaaaattagctaatacttaattaatcacgcgctaatggatcgttccgttttccgtgctagagccaaaagttcccaacctgctctctagaaacagaaacagagatatgctataaagctctagtattagcctttgctctaagcatttgtaagcattattgagagcaatacttgtcccatcaattaatgagccagagggacaattgacaagctagagatgcttgtactactttcgtcccagtataagtgtagatacggtttccgtatccaatatttaatcgtccgtcttacttacaaaatatatataattagtatttttattgttgttattagatgataaaatataaatagtaattaatatgtgactatttttttagtattttcacaaatttttcaaataagacaaacggtcaaatattggatactgaaacccacaactgcacttatattgggacggaagtagtattttgaaatggaggaattgacagcttagcatggccattttatgctttaacccattgttttgtttgttatacagattgtccgcattccaatccgcagaaaccttcttggtataaagctaaccaattgaacaaacacatacagatgacaaaagctggggccataattttgaagcaacactgttcatatatattgaaaaccaacagtaacgaaaatcctgctccataagattcacaaggatccagcatatacatatcgcaagccataatgttaagggaagtgtcatatttacaggtgtcaaaagatgaatacaattgaccaaaaaaaacttatactcaaacatgctaaatggacagacgacttattgactggatgcagtagctactgattggaatttgatagtcagaaattacaagaggaatcaggtcctaagataagacgatcatgagttggtacaaatggctaacacaacagacaaggcccacgactatcaactctttcacagaaaagtggaacaagatatatgatcacagacgctcatctcttaatgagaaaaccaagcaggattcccagaatagcaataaccagcacaaaaactagtgagaaaccaccgtgctgactccccatttgcctccttagaagatcctgttcaattccaatagaagataaatgaaactacgtgagtgttgcagtttagattcagatttcattgatgcacaaagccataatagacaaacaagatgatatttgtagataacgaaatacatctgtacttgtagaaattagtgggttgcaaataaacttgacaaaaaagtaaagaaaaacataaagcgcatgtaaactggttattctgtctatctaactcaaagctaaaaaacgtattagtgtttttttcgggtggactggtcactgctggcctcagtaaaagaacagggaatgagtaaatcatgtggtgattatttattggagatgcaaatttatcgacatagctgttgcttaaacctaactagcttatgcggggggataaattaatctatttcttactgccaaagtaaaaaaatatattgggtcactaaatgtttgcataatcaagctaaccagttcttctcgaagcttcatgttctgttgaatggcagaactcttctcctccttcaactttgaaatcaaggccaatggctgcacatagttgtgaaagagatcagcatattgtgctttggcatcattgtcaggtagcataggaagtcggaatcctctataagaagacctctcagttcctcagtttgtaacaaaagtaaaatgctaacaaagtcaagatatgctagaggatgaagcatccctcagattaagttatcattggcatctaaatatgttgagatgaagagccatgatttatgcaaggagaacattaatcaaaagatcatacatgtagagtggagcaagaagattgacaagcaaaaataaatttatagtagtatgtgaagttaggatttagtgataacatagcattgtcaaatttaacaagagaacattgcaacacatatatcaagaaaagtacatagttttcctcagggaaaaaacaaagtgcatagcataaaacagcacacacatagttctgttggatcagagttctaaaacaagtgtcatgcagaggactaggaaataagaagagcacagcaacactgtaaaatataattaaacaacttctgaagcaatgctcttggataaaatcacacatagtatctctaaattatgacacctatcacaagaaaacatagatgtttcccatctgaagatgcatacctcagaggttactgtttctgattctctagatccttttgttgcctgcaaagagaagttcgcaatttgtttcagatgataaggcaatgaaggatcaatgcactaacaagaaacgacggcggatagctgttagacatgaaattgatgaaagccttacttcttgataactcaagcttcctagaccttcctcagacccgccattgagagatgtcgggtgaggttgagtataaacaacctttaacttcacctcatccaccacattacctgattctttcgtaaactacataggatcactcattaggacacaaagaaagcagccaacataagctacaaatgcaggacacactagaaactagaaagtcggttggttaccatgtctccggtgatatccttcggtgtgagctcttgtgtcactatggcactctgcacaaggaatttgtccttgcattgcatgtccggtggcgcctcccgctgagcttgcattgttactagatttgataatcaattgataactaaattcttagcataaaaggcagtcattcagaataagataatactgacgcaattcatcaaattaccaagaacattggatgtggactggggagccacaatgccgttatttggacggacgcagtacttctttggactagttgtcttaacctggagaaacgatgttgaattaatttagttacttattactgcaatgcatatttcctcggaattagaggccaaaaagattttattaataccttaaacgtgacatattcatctgtcttgtttgttaggtgcagagaacacgagatttgcttctttaattcgactgcatgattaaaaaaaggatgcgaaaggatgaatattctgaacaagacaatattatcatcacatattaaagaattaccaaaatttgcacaaaagaatatgcttaaaacaaaggcaaatcggactatcggtgaagtgaacaatcaatattagctcaaaaaagaaggaaaaattccccctgagaacaaccctgaaatttcttcatacataaatttctcgaatgaggccgcattaaaatacacccggaaatccatcggaaccaccgaatgaactgcaaaactcccttcaaaaaacccccaaaaagaaattctcgggacaagaaaacgcacaggggaagatgagctccgggggatcgatcccgagcagctccctggagtcggagctcatcgccggcgaatactcccgaggatcaaacgggaagcgatccgctccgacgggcgccccagaggcaaggcctccaaagatcgaatcttttttcgcctcctgcatccgactattctccagcaaaatattattcctggagcagaggaggaagcggagcaaaacggggaactcgttggaattttggaacggaagagagagagagagagagagagagagagagagagaggcgctgctgtctggctgcttgcaatgctaatcctgaagggaaacgatgcgacggacggacgacacaacgctgggaatcctccaagtgtgctgtgctgcgcagcttgctgccactagaggcacacggcgaaatgcgcgtcgctctctgggacccaaaaaaaaaatactcctgcaaaaaaacaacataagagaggctttgtgtttctcttctcttcgtcgtcttcgttttctggaggcggcgagaaggaaagggaaaggggagagctgggcttacttatcgttatcgacgctttctggccgtatttttctgctcaatggctgcttagctttgctccgcgatcaagacatgtcaaaggtgtggtagggatgtactcccccgtcccgaaaaaaatgaatctagaactggatgtgacatattatagtacaatgaatttagacagaggtatgctcaaattctaggttggttttttatgagacgatgagtcgacatgtttttgggaatacgcgaggtgcgcatttttattaagaaagaataaatgtatgtacaagacgggccgaacaaattaaaaatgaagaggacagggtacaggaggggggaagaaaaacagaaagcctaatcttctagggaatttggtgacccatctatcaaagaaggaactaccatggccggtatggctgccctagccatccaccaaaggtccgcttcacccgtcatagccctagcgatctccggccaggttctgctttcctggttgaagagccgattgtttctttacttctagattgtccaagctaccagtgtggctatcgtgtcaaaccctcggctatgatccttggtcatcctcttgcggctgtcacacaaccaaacatggaaggactgctcgttgattggaagacattcggaatgtatgtaagcgggtcgacatgtgaatctacttatatatatatcaaataagtgataattaacaggttttcatatcatggtccggcttattatcatacctagaaatataagtgatcgatccataaacttatttatagattaaattagtaggtaatccacgagttaatctacggccactaaattttacttataagtgggtttatgggttggtaacttgatacacttacatccctagctagaattatatggccagtgggaggaatacgatcgctccggacgtactgagagccggatctactcctgttgcaaatctgatgtgaacaactgcaatttagtccggtgaaattgactaagctcctccacaattacttgttttagataggtcatcggtcaatatattgaaactttgagtatgaacataagatgttttttctttcctcgcaatataacatggacatgctttttaagtggatttgtatacctcttttgcgctaataatttggagagcatataactctttcggacaattctagactctagagtgcaatgtatgattgtatctgctcttgtcaagctaacttgggcgtgcagcctgctctttgaaatttaatcggcacgcttggcaggagtaggttctctactgtccttttcagaagagatatggtgcagcgtcagaatcaataacatatgttgcccatccaaacagtaagtgtgtacacaaatcagcgtcagccttttccaagttctccaagtttggtggttccttccaactactacctgtaagtcagacagtccctctaataaggtcctttttgtttcattttaaaattattatactctagattattaagtccaattgctagctataagctgaataataataaactaaattagaataaattgtaagttgtttgtttctctgaattatttgatacatgaattattgggtttgaaatattaatgtctatcatcttcttggctattttggatgcttgttcacttttttatcactgtatataggaaatatataattggtagtggctaaaaaatattgtcatatatatactacagtggcaatataaatttttcttggtagaattttgtgacatcaccattcacggttactcgtattagctattgtcgttgtccatacactgcatacaaattataggagtactcccagttcttttattacacatgaagaatcattgtctaaaacaacccaaatctacaatggcatagagcaccttgaaaacctgtatagcctattttgttttctaattaggatgtaacttttcttgcgaaaactttatagacatgaagttgctataaaatattaaataaatactttttcacttttaaaacttaattaattactacctccatattttaatgtatgacgccgttaactttttgtttaacatttaaccattcatcttattaaaaaaaattatgtaattatcatttattttattgtgacttgattcattatcaaatgttctttaagcatgacataaatatttttatatttgcataaaaattttgaataaactgaatggtcaaaggttggttgaaaagttaacggcatcattcattaaaatacggagggagtataagctaatggtttttctcctattatttgtatcacgatatctctgaataccaggaagtcaagtcaactagccatcgtgacgacaacgacatgccacccataaggagttagtactgtacactatacatatacgaatcgtcgtcctatacaaaatccagttgcgactgtaccagttagttcgggaagaaaaggtaaattataggcggcgttagctcacacgcacggtccaacaatgcgacgcaccagcagtccgtccagcaccccaactccccgcgagtcgtggtccggtccactgcgacggaaataagggaaagaaaacacgtaggtgtggtactatttagtatatacgtcaagacagatcgatccagccacagtgtggtacgtggtggacaggtgctacctgcccgatcgatcgctgggtcttcagtcttctgccgccgttgctcgatcggttagttgagtgagacgtgcacgtacggattggagtgcgtagctagccgtgaagtcgttcggggtgcagtgcaccaaggaggcgcagtacggtgttgcgtgacgactccggccggactgccgcccgcctgcggcctgccggagggctggtgtgatgcggccatggcccgtgggggcgcgttccgtttctccagcgagaccccgtattcgggcccaatggaatatgcatatgggccccttctccgaaggcccgtttagtgtttacaggacgattagaggccaccggtatcgctcttgaggaaaaagtgcaccgaaggtccctcaacttatcatcgagttacaaaatcgtcccccaactgcaaaaccagatatttggcgtcccataactaataaaaaccggtcacaatagctccttcggtggttttgaccctagttttgtcttacgtggcagctgagtcagcgtgggacccacgtggggcccacatgtaaggatgccacgtcatccttctctctcccttcctcctctgtctctcactcttctcatgttctctgggcaaagccggctggcgctggggaggagggcgaggtaggagaggaggaggcggcgggcaacacggcagcagcggctcccacatgatagtcccaactcttttctcttctttctgtctcgcaatggccgccagcggagaggggctgttgctggcctccttcccccttctcttctctccctagatgcaattggcgaatggcagaagaggaacaagacgacgccgaccttcccggccttctccttccttgagctcctcaccgatgcccatgtccacccgccttcctcttcctccacggcgcagctcgcagccgtgctcgcctgagcgtcggctgactatgcgcggcggtggtaatggaaaggaggggctggcaccgaggtggtcgcggaggtggcgcccatgcgggccggcctagccgcgcgcagggtggcactcgcggcgtggtggcggccccaagcaagacgaagaaggcaacaatcatggcggcgtgggccgtgaagacgtcgctgtggcgcggcggtcgccacccgcgccggccgtacctccccgccgcccacgccgttcccgtctccccgtcgacgcccgcgcctccttgtcgcccgcgaccatgcggatgccgcctctctgccaccgcgctcgcctgccgacgccgcctcgccttgccgccgcccaccccttctcccgtgtctccgccaccgcgtcgcctcgcccccatgcggctatcgcttttcggcgtcggcagcttcgagaactccccctcatctcacctccagctcgtgctccccatgctcctccaccgggacctcctcctcctcccgccagaatcctccgcccatgctgacctcttcgaccccgtcctccgcggttgagcgcaccgccgcgacggcgatgggcttctccgtgccaggcatcaacgacggttgctgccaccaccaactaggcgcatgtgcctccccgtcgcccgcccgcgccgccgtgcttccccactgcggccgtcaccgccggccgccattgcggcaccgccctcctcctctcccgcctcgccccgccgaccggcgccctacaggcacatagagagagagagagaggaggaatcgaggaagagaagaggggagagagaaggatgatgtggcatccttacatgtgggccccacatgggtcccacgctgacttagccgtcacgtaggacaaaatcggggtcaaaaccaccgaaggacctattgggaccgattttgattagttaagggacgccgtatatctgattttgcggttgggggatgattttataactcgataataagttgagggaccttcggtgtactttttcctcgctcttgattacatatggaggacggactgattgattcacaaaaatttataatttgatcctctccgaaaactaatttcacaaatgaatcgcgaccaaaacttatttaaaaatgacccttttgttaagcgtcaaatcgtatgacgctgaacttagacacctcagcatcacgtcaactggcgctgaatgctgtgccaccgcggatgggaggctgagtcggcgtgccaacgtgcattcaacgccgtgctatttgacgctgatatgtctaagtttagcgccatacgatttgacgctaaataaaagggtagttttggccgcggtttatttgcgaaattagtttttacaaaaggtaaaattgtcaaattaaatgctgattgattgatattggccatccggcgcagagccgatgctctcgatggaagtatttcagattttcatcgactgctgaatttcacggtcatctacagtatacattgccgcgcgcagggaatgcaagcagcaaacaggccgtgcccggtgcactatattcacattgcttgtcatatgacgacggccagtgaggcaggcaggcacacggatggcccacgcacgcactcagtcgaggtagttgtgatcagaggagataagggcaagggcaataaaaaagacgactgcttactctaatctttatacacgttatttggaggtaacttaatagataataaatataatagttgtctctttacatttactgcagcacacatatcaataattatttaattacttctctctcgctccttcccagcttttctctttcctccaagccaatcaggaaagattattcatgctaattttttgttccgtcgatggtgctgtcgatagaaaggcttcaaaccagtgctaggtgtattggtgcccgtgcatgatcgtcgacagattaatcgacgatgtttttctcttggtactctctctccaccacgtaggtataaaatccaacgtaagcttactattagccggtaatttcaagttattgtacttgccgtaagaggcaaagctcgcggcatcaccgtatcactagtcacctcatggggtcacacccgagcgtgattcagggccggccgggctctcggtctagcgctccgacactccgcgcagcaataaaagagcagcagcagcagtactgatcctgtgcgatccactccacatcccggttgaccgcggcacgcgcgggcgtacatcgcgtacgggcggctcgcgctagctagctccacacgtcgcgtcggatcggatggagcatcgtcgcgtcggatcggagacagcatatacatgcgcgcgcgcgcgtgcgggcgtgcgcgcggccggccgccggccagcacctctccgcgtctcggcgtctttctgtttctctcgactcttgctttctgggcctatatacgctacggcagggagggtgtgtgcgactgtgcggtacgctcatcttgggtggggagacaaaaaggcacggagaaataggctttgtatatacgcccgggtccgccgaccggccggtccatgcgagagaaaaaaaaaagggagtatctagccgggcggtgatggatcggaggtatgctatctttgcggcagtgttgcttaatggattactttttttaactttgcttgaaatacaataactatacacatatatcattaccggagactgatctttactgggtcatgtgaaaatcatattagtatagacatagtagtacgactttcaagaaataggtggaattggttttctttttgaagaaattaaattaaatctcgtgaaaacttttaaaataatgcattcattcaaaaaaatatatatatgaccgtaccaataaattagagggtatgtgcaaacgattgtccattttaactatttgtgtcctttctatattgaagtagcagcagcacggaggcaaaggcggagggtggaaggggacgattgtttgctttgtaggtcaagcagtctgttcttgaagcaacaacaaacaataaatagaatacacaacattaagatgatcaccgctccaatcgtagtcgtcctctaggttctggtttgcgagcgtgagttgtcacatgcaacatggacgagtcatttagagggttgggaagatggcatcactactaccaccattgatgtgtcaaaatactttcagaggttagtttttgatgtagacgttgtcaaaaatccagccaccatggctaagctgagatctaaccaaaacaacactccattgatttttcgttactttcgaacaaaacaatttaagatgcacattttgagagcgcacccacagtaatcatgatgaaatatcagaagaaatcaagaatactataaaaattagggtgccaagtcaaaccagtatgtgcattgttttatttggtcaataatgaatatatttatggactacgataaaattttgaaagaaatctaatgtaactacaacgtaatataatggtaatgtaattatacgatggacgaaatattggaagtttttctcttgatttttgatcgacgaaaatttagcaaatccttatattgagattgacgaaaattttcatataactaaattataggtcgttatattttaataattcgagctaaggcatgcaagttcaattaatttattttaaaccaatatctttgcgtaccaaggtccaaaatactactccatacattcctttatattttgttgtgtcttcagctagcaatttaaggatgaaactactccatacattcctttatatttatctctgttcgtactcatcatggaccgctaaaaacttttaaatggttagattatgataaatgaaaatttaaattaaatttatgtttagtatgtaatacactttgataagattcatctagttaagtatttagattttttaagaaaaaagataaatgatcaaagtttaaatatgaacaatgcttatattagcgacgacaaatataaaggaacagatatagtaattaaccaatgtcgtggtagtcgattatatatctggcaagggatttttgtaactatcatagacagagtgtaaaagttttttttagttgaaggaatcaaagaagttatattattctctttttgaaattttacaaatttatttgccaaaatcttagcactaagcacttaatctcataacgaatgtatggtgataaaaacccaaaacattttctattgaagaaaagcacatgaaatattaaagaaagcaacgcatgcatgcatgggtttctagaatttatattgctagatgatgttcatgagttcgtaattaagacacgtcttttgggacacaatcaggcaacggaacagcaacttctctacactctacaggtgaatagggagtacgaagatagtcctgaaagaaagaaaggataaaaaaataaagaaggaaaagaaaagagaaaaacagggaaaaaagtctctacgaggaatatggttataagcataaacctaggcactcaacaggattccccatctctcttctacacactcagaagtactctaattaagcaacacacatgatattaagagatgatgatctgatgctaattaaacccttgctatatagctagaatggcgccacacatgagagcgagctagggccaccaccaagaattcggtgcttgcggccgctttgccaaagctcgctagaacggagtgacgcccatgtttgcggctgcagcggcggcggcggctgccgcagcatacaggctatccttgagaagaatgtcttcagaaccatcctgaaaatcacgacacaggaagcggctacagatgaattgctcgcaaagcactaaagtaaataagagcagtgcatatgcagtgtttgccgggtgggtctgaattctgataaggctatatgagtgttcaggttacacagataactaggttatgcttgtgtctcccatagtagtatacgttaattctctcgggattctggttacctgaggcttgaaggtcttcttgaacccctgatccggcatgaggccaaaatggatgtgagggaaatgggcccactgattgcaagcacaaggaaagtaaagccaaagcaaaggcaggtttggatcagtaaaggagatcgaaacaaatccgaacgaaccctagctatagcagctgtggggctaaaagctcccagaaaccacagccgcttgctctcggcatctcgcaagcggccgggcacaagctgccgctgtgtccgtgctgacaatgtaaggtgtccagtcaaatcaagacacgcgaacagctagcatcaagctagatactacaggatgagtaggagttcattaatgcgcggatcagacgaagaaagtttacattctttgcggctgcactgaacgcctcccggtggctgatgtccgggttgccggccttgatccgctggatctcatccctgtgtagcaattcattataagcagaattaattttttttacgagatgataccacgaatactgattaaccaaagctcaaaggaggatccatcagttttaattaggcagaaggtttatagagaaatcttacttgatgaaccggttgtacgcagatgggactctctgacgcttctccggagctgcaaaagttttggatcagacagcatccgaggaaacatggacaaatgggtaagctcacctaagctatcagtatacatgctgtctgcaaatactgaccggatcgatcgaagcatgggcttacatggccctgccacaacaagacatgatcgcatgccttgttgatctgtactatcatttctagtgctgaggagcgttcttcaagtgaatatagtacatattaatttcacacactcgaaagaaacactggattgaaatttgaaattcaacacgtacactagtacgctaatgtgtgcatatatgcctaagtaggagctataagtagctaattaacccctcttagcaagctttctgttcttaaacctcccaaacaacggtgaataagcaacaagctagcaggagaacacactgtggtgcataagtacctttgactacaaaattctagcgtttcaaagaaagaacaccaagcttgtagtagtagtactgtacttacgcctgttcgcggacgccggggcgttctttggcagctcaggctcttgctgcacaggcttcgccggaggcatttgcattgccggcgcgttgctggcgcagctgctgctgctgcggcccgtgatgctgctcaggctggcgctcgcggcctgctccatcagtaggctcggcgtctggaacgccacctcgtcctacaccggaaattacacagtcacacccatgagagctaaacgtcagtatgaatataatgtatgattctcagctgagcacctcactaaaacgtgagagctagcatgggaggatttgagagagatatatagagcaagttaggtgggtacataccaagaggccatggggggaggtgggggagagcaaggaagggccgaagtggagctggttggccggcgccggcgccggcgcagggagcaggaggccgcggaggttgacggagagcaggttggcgcagtggccgcaccgcaccgtcaccgtcttgaacaggctgctgcacggcacgccgacctgcgtggagatcgaagttgggcacggggactcacaggttagtcatgcatcaagagaaacaaaagatcgatcaaaacaagaaacgaactaacaaacgaagaattaatgctaagaagctctgaagctagcacgctgtcggtaggtaggtggctagctcgatcggcgccacagcacgtacggcgaggatggtgtcgcagcagttgcagtgcacgtagcagagctgctcggtgggggacggcgccgcgaggtggtccagtgggaagacagccgacgacgaggacgaggacgacatgatgaggacgacgacgaagacgaagacgaaggcgacggccagccgaatccccacacctgcaggctgtggctgtcgatcgatcgacaagagaggcagtactgtggctggcctgcttctttcttcgatcgagctacgcaatggccttataatctggcacagcgcaggatcagaagggaaattttacacgagtggccggaggagagggggtagccaccagagatatccttttggtcccctttgatgtgatgaggtgattagatggctggctggcttccgatttgatggacctgcccgattcgagaaagcctcggatctgtcgttgttcctgatttgaaagccaaaacaacaaacaaccacaactaactactactacaagtctacaactgcatgtggattttgccgcgagcaaagagggaaaggcagaggtggcgaggaggcagcatgagcgtggccggaggatatattggccctggacaaaagggctatgggggcgcgcgagatgggaaagagatccactagatagctagctagagaaagatagaaagagagagagagagagagagagagagagagagagagagagagactgtgtgagagagccctgggtggctagtgtgtattagcgagatgggggcatatgcaggcaaagtatagtacgtattgctctaccggccgggctctgcatgtccccgcgcaacagtagccagcgtgggccgcatctcgcggacactgttcgtgactgaaaaggggaatgagtggtggggatcgcccacgcgccccggccaaactgtggcgcgatgcgcccggtctccctctccctcccctcccctctccacggacggacacgggacacgcctggtttgccgttcgatcgatcgccacgcccgcacccgctcgagagtgttacacggagctactgctgtttggatggaggctatatgtataactcgatttgccataactgtggcaagccacacaaagtgtggccaataatttgttagccataactatgacagactttgggtagcaaataagagtatgacgcgtgggccaatgtgctagtaaagtatggcttgacttaactgcgacacgcaaataaacactagcctgaaaaattatggcgcgcctaaggtttggtgtggcaaaccgaggccaccaaccaaacagcccgtacctgtactgggtcgtgttcctgggcgcaatgatcaagagagctctcggcttgctatgtcgtgccgttcgtggccgtacgtgtagagatcagttgattattacggccggcatgctgacaaccgggccctcggcgggcgagcatgcatgcatgaacacaggagaagggggggggggggggggtgcatgcactgtatggagaggcagagcggcacatgcgtatgaatgcatgcatgccgcatgcgaccggggcggggcaagtaaaagacgtactggatcagtaagtaaaatgcttgcatacatatctcgcgcgcgccgtggcatgcagctggcagccggacgcggggtatatcgatccatgcatgtccgtccatcttgtgacaaacggagtactacacgcattgcacatagtcgcgccgcgtgctagctagccccgcccacggttggtctctgatctctccttttcgtttggcttcatgcgctggacccgggcgggccggagagtactactacctgaccagggtggtgcgagtgcgaccaacagggtatcgcgtggcgcggtcgagggtttgttgctggttggtatgcgaatttttgcggcatatataatgctcatatattatgatgcccgcatgcatggcgcagccacgtatgacgtagacgtatgcgcccaagaagagtacgtacatcggtatcgtcataattgatctccatccgagataactaagaacaagtttaataatagagctcactacttattactacctccatcctaaaatatttgacaccgttgactttttaaaaaatgtttaaccgttcgtcttattcaaaaaatttaagtaattgttaattctttttctatcatttgatttattgttaaatatatttttatgtatacatatagttttacacatatcacaaaagtttttgaataaaacgaatggtcaaacatgtttaaaaaagtcaacggtgttaaacatttagggaagaagggagtattagtcaatattaaagctaacatgtatagtaggttggctataaggttatctttattttcttcattctccctctttttattactatgaatttaatgtatatttcttggaacttgtgtgtagttagctctttcatgagagacaacactcaccacttttatttatctcttttttccacataagcatataacttgcttatagcccactattattcttgctctgaagctgacaaggacgctgcatactggttccgatcgttgcatgtgaaggaagattttcaggtacgtattccttaccaaatctacttgctgcccgagagaggccagtattcgatcggtccactcaactatgaccttagtttggtccctttcaccacgaaacacagtttaatttctttcggtacctagactcttaaaatcgtccatgttttatcaatatacgagagacctagatcgaattgcccataaactgaagggctttttcgtaaaattaccatagcgcactgttcaggcgccggccttgaagaggttaatatgatctaaaccaaggtgcactgctggggaactcgtctttagtcccggtttgcaacccctttaatccggggttgtaaattgggacgtctaatccggggctaaagatgcctaccaacttgaactaaagatttttttttctttgttttttattgcctgcatattgatttccctaaatcaagttgttccctacatctccaaaccaaagattcacatatcacagataacatcaaatttcaaatacatcacaaattctcaaaaaaagaaataatgaacatcaatgtttgttcttcctcctgccgctgcccgccgcccgctgctggccgacgtagagggaggagtggaggaggaggaggggccctggtggctcggcgagccgtgggccaccgcttgccacctcccctccagcggaggggagggcgctgccgcccgctgtccgctgcgggccgacgtagagggaggaggaggagaagataaggaggacgagtgaattataagaaggcgtgtgtgcggctgccgatgccgaggagataaggaagagagagagtgagatatgtcgatgacgtggagagagatatttagccccgattggtgataccaatattcgtgcccttcctctcgcgtcgctctcccattgggcggctcgggaggcgacgacccggccgccccctctctcccacctccctcctctgcctcgccgccgcccgagcggccgccggcaaagccgcgcggctgcaaggacgacggcggcggggcttcgcgcttcacaagctcaggcggctggggaacccacctgggcggtagcagtggggaccgctagatcgggatggtgacggtggttggtgatggggaagacaacgactaaggggttggcgacgacgatggtcggggtgagtggcacggggggggaggggggtttgtggccaatggcggtggggatggcgacgatggcaggggcggcaggggtggagtccgtggatccggcggcaacgcgccaggatctggtggcggcacggcagacggcctgccccacggctggcgtggccggtggtggtggtgaggaggatggtcggatctggctctagatctggcgtgtcctcagtcgggtcggggtggcatggaatccggtcgttgtgtaggtggtgtgcatagtacaggtaccttcggtgtgcaggtgacatttggtgccttccgctgtggatgctatggtttttgagggctccgaggcgaaagccttgctccgcttccagtgctagcaacggcgacgccctcgggcgtcgttcaccttcttgaaggcattgctattggagcccacattcagcaccactttaaggagtttctcccggtgaaaaccttagattcgttaggatcggacgatgtcgtcattctgtcggcgtacccttcttgaagacttcgttttaggagttttttccttgttggactgttgctcctaggatcagtacgtcaattaatgttagggtttttgtcggttttcctttaattaatcatgatgttataaggtttttggtccggttttccttataaacgggatcaactctcttcttctataatgaattacaggaactctctgcctgtcccctcgaaaaaaaactggaactaaagatcaaaaagtacccctaggcttttgaatcgggactaatatgatttttgccatccgagtaaacatcaattctctagtagtggatgttttaattagatgatgaggcgtctacataaaattcatatgagtgaagaagagagatgacatcaacataccaatcaataataaacaataacaaaactaaaaaaaatacaacctgtgtatacagcaatggggagaacgagatgtggtggggactggggaggaatggtggcagcagctattctcaacgccaggcatccccaagaagtccataaattaaaatccctcatcatcctagtagtttggaacaatggccggtgcaagagatacaaggatcaaaagcggacatagcttgggtcaaaagcgggagcaactaaccatattggaagatatcacctaattaagatccctgtttttgtcttgtacatagcctttttggcattgatgtaatctccttccatatcgatacttaagtgaccttgtacccataaaaaaaacacaacctacatgtcaacatattaatttgcttcttcgtccctcgatatatcttgctaatcctatattttttatttaaaattactaacgaggatggtacaagccgccactatcatttatgaaagcttcctcctgtcttatactcttacactggtgaagaagtgctttttaagtcccagttcgtaacctcctgtagtcccggttttttaatcgggactacgaatccgggactaaagatcgctatctttaatcctggttcaaataaccgggactaaagatcaatctttagtcccggttggtgttaccaaccgggattaaagatggagcattttagtcaccaaccgggaataaatatattttttctttttttcctctttttcattgtttttagcattgaatattgatttcacaccatcccctaatcatgccaagaaatcccaaatccaaatcatcacatatcacagaacatctccaaatcctcaaatagatatctccaaatacatcacaaactcttaaaaaaattacatcacaagttctaaaaaatatatcacagattcacatcacacacaaatcaaatatatcacaggataaatcataaattgtaaaaaaaaaaaagccggccggccactgcctcctcccctccgtgctggccggccgccgccgcgcggccccccgcgccgccggccggcccgccgtcttcttcgctgtgaatggaaggaaaaaaaaggaaagagaaggctaggagttagagataaggaaagagataagaagttagagaggaaaaaagagatagagggaggagtttgttgtgtggacgggaaaaggatcggtactagggattatatagtgtgttttgatttttattcccggttagtaacatcaaccggaactaaaaataggtttttagtcccggttgttactaactgggactaaagatcttagggccctgacacggcctgacatggaatcaaccgggactaaagatgaactttagtcccggttggagatgatttttagccctggttggtaacaacaaccgggactaaaaatcatttttagtcccggtttttattggaattggaactattgtggatttgggtcgaccgaccaaagatgatttctctaccagtgttatttggacgagctcactatgcttattttactggaagtagaaagaaatctaaactgttgatcttatttgatcgaatgattcatatccatttataatatatactgtcccagttaacgatagtagaagcatggagggggattgttataaaaaaaagttacgataggagtgtaatcgtcatttagcagtaactaaacttttccttttttttagctttttcgatggaatatgagcgatgccaacaaaatggataattatagattgatttaaccggaaaaatataaaagataaagtaactcatagtcattatattaatagattactatatgcagtataatattatcattaaaaagcatcgaagcatcgctagtaaaaaagcatcgtagcatcgctcttggactggttgtgggccatggtgaacgagttgcttgtatgaggacacgacagacatcgacgtgtttggcactgtagtagtgttacgacagaacagtgcaacataactgttctccatatataaataggccaccaaaattttacaacccgtcgaaggagaacgtttgatcctttgaggaagctagccgagtattcagagaaatggtaaaaggcaaaacaatatgcgtactctagtatattattagtactgctagaactagtttattactgcagtgaaattaagttggcgcgacgggtgattcacggtttggtttttcttttttttttctgaaaaaaaacactctatatatatcaggtatgccctcccaagcatatctaggctattttagcaaagattaaaaataaagaaaaacattttctttcaattatctcattagttaaattttgaatttgagtcgcattctaacttccaggcatggtataattccagccacaaccttccagcaggaatttggattaacggataattggatggatatacatgttcgcgagtttctaaacgatgggatgtttgtaaaaatattctatatatgaatttcatatagtattattttaatatatttatcaactttataaaagttaatttattttgtaaaaatattctttcatttataccttgaataattataaaaaaatattcaactacataattagcctttcagaaaaaaaaagaaaccgtagcaaagctttatagtttagtcactgctataaatgataattatatcccttcacacctttttattttgataatgatgtcccttgacatttctattatatactgctaactgatgtggtaattcaaatagatctaaacctttcgatcaaataagatcacggttcaaattgttttgtactatcagtggaaagcgtcgtaatggtgttctagcagataaattagcctaagacaaacatgtgatcatgaacagtaagctgcacgccgtaactcctgtttacaacctgaccagagccgcgatcgatcgcgcgaacacgagttacccgtggtgaaaggcccacggtaggaagggtgggttcactgcatgcgctagctagcagctagctgccgttgctgcggccgatgtagccgtcgttattcccgagagaggcggccgccgcggcgcggccggcagcgctctgtagcacaggagcaggagcaggagcagcatgcatgcaagcacagggccgcgcggcgccagaggttggggagagcgcgcgagagaggggagatcgatcggaaagagaagacgacgagcgagcgatcagcgcgcacagaagaaagaaacccacgcggactctgagcctctgggagtcgcctagcggatggaccatggagaagaaacggatcgaaagccaaattagccgaaggaaagttgtgtgatcgatcatggtcgatcgatgtgtgtgcagcatgcatgaccacgtagagctttcatgaccagggcgatggtaatccccaaatagacattttctctacggaaccaaataaccagtaaaaaattgtacgacatacgtaatagaattttgctccggtctagcaaaaatcaatttcaatcgttgaatctagctttacaggataggcatagttagattcaacgatcgaaaacgatttggtactgtgagttgttgacatctcgagatattttttgttggaccagagcaaatttctatgtaatatgttcatgaagatttgcatacatgggataagttatctcaagtcatatatgcagtgtctttacattgttttcttttttttctacaagctagctctccaattcgctgtcgagctgcttgctatactatatactctatcgacagacaactccttcaattcctgtagccttgtacgtttacagatgcgatagatacctttcctgtggtgaaagtgaaacgagctagtactagcgctcatatgagatgaggcgcattgaatagggcaagcaagacgggagtgaatgtacagaggagagttgttgcggggagcagggcaaggcagcggcagtgcagggcatgcaattataaagaagggaaggctttttcagtacttttgctgatttgacctcacactatcccatcagctcacctcacctcgctcgccaacaaaagagcccagcagcagtagagagggcagagatcctctatgcacacacaacacactgcctcgtcgctctcttgctactctcctctctctttctctctttctcttcccaaagggtccctgcacttttaatttcctcaaattccgctactacttttcctgccgactgccgaccggcttggtatcttatacatactctctccgtccaaaaaaagacaaaccctggtttccgtgtccaacgtttaaccgtccgtcttatttgaaaaaattataaaaaaaattaaaaagacaagtcacacataaaatattaatcatgttttatcatctaacaacaacgcatgcacactcaccctacccctatgagcatatttgaagactggccagcaaatccatctggagattgacgaagtcaccgcagacatctcgttgtcgacgggtacgtcgcctaccattgaaagcacaaagccgttactccaggacctaaggtgctactgagactgttgtaaccactaggctacaaggctctactatgtttatataagtaatcttatactccctctattctaaaatataaggcacaaccactctcaaattaaaaactaggaaataattattaccacctcatagaccgtgtttagttgttttggcaattttttttgatgtatacaaacacacatttaaagtattaaatgtagactaataacaaaacaaattacagattccacctgtgaactgcaagatgaatctattaagcctaattaatccgtcattaggtagcaccacattgttaaatcatgacgtaattaggctcaaaagatttatctcgtaatttacatgtaaactgtgtagctagtttttttttcacatttaatactttatacatgtgtctaatttgatgtgacagaaaaattaaaagtttgaagtgaagtaaacataatcatagtttagattgcttttctttctttcattgtttacataaagcctgcagggcattcacgcacaccaagagatatgctctcaccgtcaagctttattcccttcgctgcttgtgcctaaccctgtcgtttcatggccagggaatacaaagaaaccttttcagaagggtgagatcgacgatcgctaataagctacagcaaactagatagggcttgtttgattatctatcctactgatttattggtagtactaaaatctaaataaactttagtattaccaatgaattggtaaggtagaattagctagcttatgtttagattgagaacagtatgaagccagaatttaatattatagtgaagaaacttttaaaatttagccaaatgaaacatggcactaccaatttgttgaatttaatccgaactagcacattaatttattatttaaattgtcagaaaattggtaagtcacattttcgtatcaacgcaaaatggcttattaatatagtgtccgaagatcaaccattaattcccactcctattaaattagtctacgcgccattttggtgatttaccacgaccacaagaagctagcgaagccgcgcgtgatcagctgcacagttaggaataggagttagaaaagatttttccaaatgaccgaaacacgatttcgcgtgcggttggataacttctgctcttagaggtccgcgaagatcaccatcatcgcatcattcctattaagcaactgtacgcaaagatcgattatcgcgtgtggtctcacattagaggactgcatgcgatgtggccgtattgcgtaaggtacgtcctcttaagcaaccacacgtgataatcgatattcgtgtatagtctatgacctggtcccaagggaccacttatatcccgtctgagatctattaggctagctgctcgttcagaataatcatatatatagtagtgcttcagaagttagttactaatctcttgcaacaccacagaaaatggcagaacagattttgcaggctagctagctagctaacacatacgtaatatacatgtttggtgttgtttctctctctcgagcttcctctccggccctcgatcagtacggaagtactccctctatccgtgaatataagggactttctctatccaacttgtcttaaaatataagttttagaatcctaacatagtactatattctccacctactaatttttataatattttattcctctaccatctacttttatcctaatttattctctcacctagtaacttttatactactttattctttcacccatcaccttctgttccatcacatgtccttttaccacttccttaattaattcttactccttccgtcccaaaatataacaactttagcactcaagatttgtctaaaatataataacttctccaccaacattctttttcaaaccaatcacaaccctccagcattcacattttccgtctctctactactcatgcaatcataaacctccaccattcatttctacctattttcttaataatcgtgtctaactctaaaatttattatattttgagacggagggagtattgaaattggtataatcccttatatttatggatggagagagtagtaattaaactgcaatcgagagtgagctgatgccatggccggagctagctagagattccagacgtacgtacccttctcggtcagctactcagctgcctcagctagctcagtcttttggtcagccggccatccggccggtcctgagacataattcgtcgtataccggtgtgagtgtgacacgcctcttcctcaattgaattgaagtatttagctcttcgagagaagaagaaaaaaaaaaggagaggcaaagctagccatgcatgcatggcagagccggggaccaatgcaacgatcgacttgctcagataacgtagtacgagtatagtatactactccttactaataaagaaattcgtttagaacaatatttaagtcaagccttgaaaatataaatcatgaataattctcacgttgttgagtttgaaaatgtaaaaattatatgtatagatttgtcttaaaaaatactttcctaaaagtatacatatatcatttttcaataaatatttttatagaaataagaagttaaagttatgttttggagaccgtgttattatactaaatgacttcctttacaagtatggagggagtatgtgttgtgttaactgaccatgcgccgtatgcacacgtactaggcatgcactgatcgaccggtagatgcatcatgcatgcttccatgcacgcgttaaatgagcactgcatgagggcattctcaacccaagacactagatatggtttccataaacttcacattaccaagaaactagtgctagacactactctttcaatgcaaacaatactattccatacttaaatttaatgctacttatctcacataatgtcttggatgttgtgtagaaactatgtctcatgcaagacatggtttccttctctttcctcatttattcacttgacacatcattttttattttaagtgtcagcttatttaatgctatggacaccatcctagtcattgggttgggaatggcctgaatggttgcgagtctggtacatgctatcggttgaaatacttgctaaatgatgcattaatacagaagcatatatactaatcgtattatactactatatacttatactgcattgcagcctacgcttgcataattaatcaaataaaatacggatatatagaatggtccggggctgaggaaagcgtcgtactaggctgaaacctgcaagcagcttaccctgcatctgcaattctgcatgctgagatgcagaggcaatgcaggggtactagctaataatggagtaaatatgaaaacttatgcatgacacgcgtgcagcagcagtgtagtagtaggatactccagcaacgaagacgcccatcatgcagcagcagctagtagacagtcttgaatccccaagtcaacttagatgccatggctcctgcttgtagctagcttagggctagctgcatctgcatgaaaagagggtgtttttagtccctctctctcaaacaccccctaatacactcctatacaacagtagctatatactataggcatcaggcagggtgcgctaattaaacaagcgtaagagaagaggaaagaaaatgctgtactcctaatacacaagcaatagcagtaagtagtaacagtttcagaaaagaaaatttgctcaagctaagctatagcttcgctgtggtccggcagacaggccagagctagctgttctgaaggatcatctgatcatcagagcccagaaatgatagggatgccggttgagcagattgggtcaggtcgttacagattccaacccagaccgtcgtcattgccggcatctcgcggcaaatcaaagtaaccttacgacaaggcagtaccgcgtacatatgtacatgatgcgcgcccggtatacgtatatgtatagccgtatagcctgctacaggttgcagcaagtgtactctctgtagtctgtactgtacatatatacgatacgagcgtataatacatgcatgtgcgcgtctactagctcactcaattacggctactagctactgtagctatactaacgaagtgactggccagcgtgaagacagaaatgacagctaactagccacggccaaggccagtatagcatgtactcatcaccagtttttgtcaacgtctacagtctactactacactggcattcatgggccaagtttagccatcttgttatgttacatcgggccagatacctgcatgggctttgctagccatggagcccaatatggcaaaggcccataaggaggataacggaagcccactacaggctctcggcccacaaggcgcgctctctggatcttttccccgcatcccccgcgtcgtgccggcggtggcgcgacggctgcgcggccggctacgtgttcgcgcgcgagccacaacacgtctcacctcacccacacccactctcttcttctgcttcctcccacgccgcgagagcgcgcgcgcacacgcccccgccatggctctccccaccacctcccccctcgccgcggccgcagcgaggccctgcgcgttcccgacgccgtggagatgtcgctcgccccctcttcgccgcctcccgcacgtctcctgccaggcgaaccgagggggttctcgggacggcaattcgttgagcacctcggcggcggcggcggcggcggcgtcgccgccgccgaggtggcgtgccgcggtgtccgcggcgctcgcggcggcgattgtgtccgcggcgccggcctacgcggatcttaacaagttcgaggcggagcagcgtggggagttcggcattggctccgctgcgcagtttgggtcggccgacctcaagtacgttacgcgggctcctttcccctttcggatcctttcgttttgcctcgtgtcgctgatattcttcgccccgtgcttgtatcattgcaggaaggccgtccatgttaatgagaacttcaggttggatgcctaatttcacaaatcccaaattagtattctttcgtgctgcggtgctaaatgtttgctgcttaccataggttttatgtaataattgaaccaaatgaatcctgtgtttccaatttcagctataaacagaaattccatttggtctatgcctgtttgggttataaagtaattttggttctctgcaagtgttgatacaaacttttctctagctcatgcttatgctgttatatcatcatcttagtattctggatagatagacacaatctctggagtccagtgggttatgcattttttttcaagcattgattccattgcaggctatagataagacataaaagctcttgcagtttaaagtttgcttagttaagcagttttactatagtactatcatattggcatttattgcttaacatattggcatttatgtggagggtggaagattaaaatagtaatatcgcaaaatagtaatcagccacataaaaaacaatctgtagatgagcagccaattttgaatctttaccatcactgcttcagcttggcatggttgtccacctttagcatatattacaattctctgcatatgaaagatatattgatatgcttaattaataggttgggtaccctcaatttctgttatgaattttccctatggctcaagaaagagatcattttttttcctttttaatacaacatttatcaatataggcgggcaaacttcactgctgctgatatgagggagtcaaatttcagtggttccacattcaatggtgcctatcttgaaaaggctgttgcttatagagcaaattttactggtaagtgaaacaacatcttttcagtatgtggatgtgtcaaactccctccaagaagttattatacactcatgcttgatgcaaataattacccctgttttgtgcctttgtggttagtagtcctgtactctagtgatatgccttaacagggagacactgcactagagatatcatagagagcccttgtttgaactccactaaggccttcccagtttaaactctgatcaggaggcaaacaataaacttcattttcttttgttccaattggaaccaacatggtacttaggtctttgttattgttagtgaaagcaattgcagaagtagagtcctgcatctgatttttcaaaatccttgtaacttttgactgcatctgaatggttacagaatacttcaaccttcccatgcagttatttatgacacaatttcactgtactattgtttggtcttttgcaggtgcagatttgagtgataccttgatggatcgcatggtaaacctacaacttctttatgtcatgtttttcttgtgcaaagtatcttctgcaaatacatgtatatagttatggacttgtgatgctcaagggcatatgggtgatgcacttagttgtgcaaatgcggaatttgacatcagtgtgttaaaagagataatgcatcagaattcttgatcagtgtagtaaatgattcatatattagttttggtgctaaatgcttatgaatgcattgttactttcaatatgaagccaggttcaatgtaccagtttttaaggcaactactggagtctcctgttcttaatttacaacatcgtttagttcttcaggaataataatttcaaggcaaagtaacctttaagcatgtattgaaagtttgtatgttattgacaggtgctcaatgaagctaaccttacaaatgctgtgcttgtacggtcagtccttacgcgtagcgatcttggtggagcaatcattgaaggtgcagacttcagtgatgctgttattgacctgacacagaaacaggtacatgaaacttgaatgacactactatcacgtgtagtaattatcaaactaaggtttatttttgcatgttccacgggtctgtttgataagcagttgagcatgtcagattctaaaaatgttccttttatttttcttccacgggtttttcttctttgacgtgtttgataagcagttgagcatgtcagattctaaaaatgttccttttattatggatgcttgctgtctgattttggtattactaatttttaaacactggccaacgaactgtgtatggatgcagaagtaagtgtcatggaagagaaaaccgaatattcagacaagagaatcttgacatgaacttgactattatctcctggctgttatgtctcatgtcttcgggaaggaagttccatgtgctcaactgctaacaacacaatctttagcttgaacaaacattgcataatcctaatgtcccgcatctgtgacatatgaatttgaagttgagaaccggtgccatactgtttcagcagtggtcaaaactaattttggatgatacataaaagaatcaccatatgatgccatgttggggtctatcttcaatgttttgcatgagttctctgattctcttttatacagaaaacaaaagataatcctgataactaatattaggcaaactggtatgtaggctttgtgcaaatatgcaaatggaacaaaccctttaacaggggtcagcacacggaaaagccttggatgcggcaacagtcgccgaaatgcatatgggagcccttcctcccctcttttgagtgctccaccacccaaacttctggaccgtgatggtttctgcgatgaagcaactggtatgtgtgacgcaaaataaaagaagaattatccagcatactgcagaaattgagcactgaatgctgtatatacattggagactgaacaaaagacaaagcagatcggttcaggattcagagaaattgttctcgttttgcgaatgttgtagcattgcagagagatcaggtaaactaggactgtagacaagttatgtgtactgaacgactgatgccgtatatatatgtatatcaaagtgttgccgaattcattccttgcatatctactggttactgcttgcactagctaataaccaatggagtgcttctgtcagtaaataaacttatcattcttttcaatgaattgggatacatctgttaagttcacaaacatttctgacgcatcggcagcgaccatagctgccgtatcgaatgatggactgcacaaatagacgtccatctacagcttgactgtttttttttacaaattgtgtcaagttagttactgaagccccttggcttcaccttacagctaacttattaacaccagatcccgcgatctgatgtcaaacaatatgaaccactttggttacatacttattatttacgtatgcgtgcgtttctcttgatatatatatatagccagctatatatatttgtacacttggctagatcagatttggatggtataaattgtgtgtgtatatatgttgtccagtggatttatatttatgtggaaagtgaagctatttccacagatcagcctcgccgccgccggagccggccgacgtcgaagcgtagtccaaagcctcttcatgcttgccaccgtctgcagcctgaaacacctgagccggatgggatccgtagctggacatggactccttgctgagcagctgagacgcgacgaacttgtccagtagcctccagtccgtcaccgacgcgtcgacgccgatgccgacgccggcgccggccatgtaaacagcctccaacgacggcggctgctgctgcgcggcggagccggaggcttcgtcgtcgtgagtagtaagggcggtggacgacgacgatccgaggtggccgccaatgtaggccgccgccgcaggaggcggcggcggcggcttggggctctccagctgaggaagatgctgcaggaaggcctcctgcggcaggaggtggtggtactccagctccggcttgcagtgaccgtacatctgctgcagctgctggtggtggtggccgtggtacagcgccgccgacgagcccgggtggtggtggtggtggtgcggcagtagctgcctcggcgagctgaggtccggcatgaacgcaccgacggcgccgtggtcatcgaaccagcacggtgatccgtcggccattctccgcaccgtcgccacccgcttcttgaacacccggcagaccacccatccttcctcctacacgcaccaatgatcagtcaaccacttagtcagacttaggtgcatgaggcggattttgaccgaatctcattctaaacatcaagagatttattccgatccaataaaaaatatctcaagttacctcatgacaccaaatcatttttgatcgtttgatctagctgagcagggtgggcattgttagatcaaatgataaaaaacaatttggtaccataaggtacggtacctttttattggaccggagcaaattccaaacatcaaatatatgcatacaggtgtggtgccgttttcgttggtctcgaggcggtactcgtgcatgatccagtccgacttctggccattgggggcacggcccttgtagaagacgagtgtcttcctcatcccgacgaggcagctgcgggcgtagatgggcttgtccctccccgtcgccttccagaagccggcgcccgtggcccggttggtgcgggtgcccgtcgggtactttttgtctttgtggctgaagaagtaccagtcattctgttcttccatgccaatcttgcacttctctgcaatatttgtacatgttggatgctcaattcaatcgcaaacctaactttgatttttttgattcttcgatcaacttgcatgcatgctaattaccttggagatcccagggctcgattttgtacaggtcgacgtcttttataacgtcgaggtcgattttcttcgatgccaccttcttcctcaggtagtaatcgacgagctcctcgtcagtagggtgaaagcggaaaccaggtggcacatgggagaaagtgtccatcttattcactaatggactagtagcaagactgcaaggacatgcataacttttagtataagtttttgaaatgctggcgttgacatattaattaagtccagtacgtgtagtaattagcaacaggataaagaatagtactaacatataaatacacaacaaagcatctagatgcataaagaatgatccaaaaacatcacacaaaaataagcatcatcaaaccaatgagaaaacacaaaagaaaaaaaacatattatatatgcaattaaacagcacgaaaaattccttttatctccttttcgtctgctgtaacattgctaacttcataaccaagtctggtagttagatggcatgatcgtttgtaatatttcttctacaactggatcggtagcttttgtttcattttgaattggatcgatgatattttcaggaaaagctagcaatcatgacactagataaaaagtgccatactttcatcatatacacgattacctggttaattcaatgttttaggtttccttttgtgtcaaagaagctatctatgtacacatcccttttgataaatacacagccttgacaaaaaatcaactatatctgtattagctgccggccggtgcgcaacgttaaatactatcgacaagagggagtgtatggatcaggatcctctacagtcgaagtcatatgacttaatttgttactaatacgtggttccgatgatccctaggctcacatgtcagtaacaaaggcactgtgcatttgactgtagagaatctctggagtatagtacgtctaacttcaaatacaacaatgcatttattttctatctcatgagagggagagaactgatgtggaaaataagtaaaagtaaacttagaagatttttatttgtcatcaatcaaattaaagagatgagtgtgcacgtgttttaaacgtctgcgtttatactatgtttctaaaaaaacaaaagagaagcatatcctaatgtcataaccctagcttcctcggaaatggaagtataacttagaccttaactgtttgtgccctaagatatgacactataatccgtgttattcagttatttcaaaaaaaaaatcataactgtctagatcgaattcatgaaatgaactgagagggcatgcaccctaaggtctgacatacttccccttgtttcctccatgcacggttagaacatattttttggtaaaattaattagggtatgacatgaaataatcatcatgacttcttaaaataattcacaaaacaaacgatcataagcaacaagaaaggtatagactagtaatggcttacctctgacctattattgattgacatttcttagagaaattcatatttggaaaagtttatatgcatgtatctgaaattataactctttattttgatatattcaatgttctatacaaaaatcatggaaatcatgtgcagcttgtttggatgatatagctttgaaatgatcatctcagccaaactggaccctgatataatgtaactggatgcctcccctatgatgacaaacacccacacaaactgccatagattttttaggtgaaaaaaaaaacaccagaccgaaaacaattaataaagaagttgtcgatgtgttatgtcttctgtgtatataggaaaattttcctggtgaaaacattcagtagctagagactatatcaagaacatatttaaatttgtataggaaaaaaaattatgcatgatgagagagctagggagggagatcactgatattattactctgcaggaagaaccgaagcgcaatccacaccactcccgagcaccaaatcttgtttgttccaatgatcacaaattcacaatgagatcaaccaacaaccctatcagctgcagttgtcaagctcgccctcttctcccttctttgcgtctgttctcccggcaacactttgcaggtcgattgtgcgcggctgcccttaatcccacgagctatagctatggcggccaccaccacccttcacgctcacaacctgtgccaaagacgaccggcagaatttacatacagcaacggcgccgccggccgccggccgggcacaagtacaaaagaataaaagatcgacaagacggataagagaggagccagccagcatacgcatcccggctcgatcgtatgatcacctacttgtaggcaaaggtaggcagagaggaagcaagcttggttaattaggtagcctccgatgagtttatccgctgctccgcgcaagagcagctggcaagctggctagctcgacacgcgcgcgccccgtctcttttatctccggccgccggctgatcgctttcagcgcgcgaggggggagggatgagagggacggagggtgtgcgcagaaagggcgggtggattgcgggcaaagtcaggctgaaatccagggatatcctggatctgcctctgcccttactttcccgaatattggccgcccgctcgatccacctcgcgtcgcgcccgccaccgcgcgcgcgctctcacggtctcggctaagcctttctccactgtaaccgccaccaccaccacctccacccgccaccaacagcgacctcgtcgatcgtcgtctctgtgtgatctctcaggctctcctagaatccctagctagatagctcggatggatggatggatggatggagaagggggtggaggtggagtggagtgaaatgtagcggcgcccatatatatatgtgctcttcttctagacgactactgctacaggttggtggagtcaggaacactactggtcagtctctctctctctctctggtgatagaacgatctctcgtgtttggctctgcgaaatgccacacgatgcctcgctccaaacagtagcaggctagcagcgtgcagccgtgcaatactattggaatggaattcggaattccaatctgctttggatcatgcgcgcgcatgcgattcgcagcgtgatcactcatcacacgcgcatgtataggcggtgatctccctagcttactgaattcagagctcactcgctaaacggctaaactacttctcgccgacgaaacatgcattattatttttttcatatcctagttatatactccctccgttcctaaatatttgacgccgttgtttttttaaacatgtttgaccgttcgtcttatttaaaaaaaattgtgaaatatttaaaactatatgtatacataaaagtatatttaacaataaatcgaatgataggaaaagaattactaattacttaaaatttttattaagataaacggtcaaatatgtttaaaaaagtcaactgcatcaaatatttagggacggagggagtaatatgttctgaagaaattttaaccatgacgatggactatcgctatcctgatctaccaattgggaaatcggagcacattcccaaacagacctaggtatagtagtatatttcgatggcgactcttctccagatggaaattaattagagccggaagccttgcattgaagaagccaaatacattatcctcgtccgtagtcgatccattattagtgcacaaagaattcactaatttaattaggttaacttttactccgtacttggaaacagaagcagcaattcgatcgtatagcactctatcgccttgctacttttgctagtatagtacatagcttggatatttcatatagagtacgtacatgtgaaacctaattaaaaggagtataaacatgcaagaggcaaagagcaaagctagatttcgccggtgccggctacaagaacagtcgtcgaggccgtggcggccggtggtccggcgtgggctcgacctcatcattagcattttgcaacatttgcttttattatctctgatcgatcttttcgacccctagctagcaagcttctccttaagcttcctcggcaaaggaccgctgcctactggtgccggccggctgacaccctgggctccactcgcgcacgaagcccccatcccttttctggaagaggaggccggccgggacgcatgcagctacacatcgatctctccaagattccaaattaacctacctatctcgggtaaatatacggtggaaactgaaatcgtctaaaatcatacttctacatgtaaatgagatcacggtgaatagctgtgcagcaaatctaatataaattcgacttcctttgtgagatataaaactaacaaatttcaaaccagaaaaatagtcttgacgagttgtttgaaatttattatttttttatcttacaaatgaagttgaatttgtgttactccctcagtttcgtattataaatcgtttgatagtcaaacttctttagttttgaccgactttgtagaaaaatgtactgacattttcaatataaaacaaacatattattaaagtttattcaatggtgaatttaataaaactaatttggtattgtagatgttgttaatcttatctaaacttaaagtaaacctaaagagttttgactaagaaaaaaaatcaaacgacttataatatgaaacggaggtagtagattttaattttacgtagctattcattatcatcttatctgcatgtgggattttttgtgtgatttgagacgaatttttggtcttggtttacacgagttttcatctaagtatacaaactacaatatattttcccacctatctcaatactgcattataatcaacccttatatagtactctctccgtttctaaatatttgacaccgttgactttttagcacatgtttaaccgttcgtcttattcaaaaaaattgtgaaatatgtaaaactatatgtatacataaaagtatatttaacaataaatcaaatgataggaaaagaattaataatttcttaattttttaataagacaaatagtcaaatatgttttaaaaagtcaacgacgtcaaatatttaaaaatggatggagtatcttggtaatttctattgatcatgcatctgtcttctcttctttcttgagcaaaataatttcctgcaaaatgaatgggccgggagaagtggtcggcatcgatggcatgcatcgtgggcaatggtcctgaagattattagctaaccgacgaatggctagtaccacttatgtggccagttcaatctggtaaactctttgatgaatatctttgtggccagttcagtcgtctcagcctaacagaaaaggtcatgcattctaatttgtgtggtcctcaatgtgatgacaatgcaggcgctttgttcgcacgcaaatatgaaaaggaaggacgtttagatcgatggtcgttgttgtaaagatcggttttttgcacatgcacatttcataatcgatcgatcacttgagttgatgggcgttaggccaatcggcgatactagctatatctcacgtgcagaactgtacatgtactgttacctctagcctcagccgaaatcccaatgcttggatgtgcagcaatatctaagatgaatgcacacgaatgcaatgcactcaaacgacaggtatgtgattacttactagtagaagatgtagtttatgattagcattacgccagggatgcaatcatctactgttttatatatatgtggttaattttattatgtatatatataatatattacaaaaaaatataaaaaaaatcatgcgtgcgtgtgaaaaagaaagacgcgattaaaaaaatctgaaaaaagcgatttaaaaaaggaaaaaaaaactgacgttaaaataggatatctaggaaaaaaaaagaaacgtgtagggacgcgctggcgcgcgccggctcctttccacggcgcgcacgcacgcgctagtatccccctatttaatcccccaacacgtctatattttcttcttaaacaatatgtggaggtacgtctctctccttcaatttttttttcaaattaactagcaaaatacatcgcttggtcatcggtgcaaatcaaggaatagtccgtaccgataatcccgcaaagtgcacgcccgcccaggcccagagccagccccacgcaaacccatcatgagactagatagttgattaattcgtgtcgcatgtttcgtcacctcgacacgttggcgtgcgtgcgtgctgcgccggtcgaccgtccgatggcgacgtacgcccggagtagccgccgttgggaatcacttttttcatcaccaaaattcatcagtttgtggtagggggataccggatacgaatcatacgatcgatcggagggtccgatccggtacgtgtctcgatcaggtcataacaaaatccccaaaccctcggtccgatggcgaccggtcgatccgtatatatcggatgcattcgggtggacgctagctagctaggtgctgggccttgttgcatcttgaatacagtatgcgccatcttttttgtggggagagataggagtgaagcgaaagggtcgggctcgatgcacgccacgcgtgcgtatgtgcgcgctagctgcagtgcgcccgccatctcatctcgcacacgcgccggccggccgccgccgcgcgccgctgcatgccggcccggccacagctcgccccactgttccgatcggccgtgtttgtgtgtttctatatgtgacgcgcacattcagacgattgcaacgacgacgataaccgtgtcggtgtacggccgtctagtagcatcagtctacgtaggtcaaccatggatggatgtcacgcgcgtgctgcccaaacgagggcgtgtgcgtgcgtactgtttgtttggcctttttgacttgtgatttggaactttgcacctaggtttaagcgcttggcatgcactcctgtggtatactccgtatattagtgtacgtaacagcagttgcggccatacatattctcgcgcatgcatgcaccatgcggtggctatggccatgatcatcaacgacgagtttggaaacggccagcaagagacctcaagtatgccggcggccggctgcagctgcatgcgtatgaagaggctaattaacttcctgggttgcaggcattaggcagtgttaattaacacaagattaggaatttttgtgttcgcgatcgattagcaaaacttaatttattgagaaaaaaaaatcaggttagcagatttttagtggtacaagaatctgcatccatgccaatgctaccgatcatgcagacctgaaccacaatgtatatttttgcctggtgcggcgacatggtcatgaacatatggaatgatcgatcgatggaccgatcatggggcttcttctcttttccttcttcccgtcccggtaacgtgggacccacagacgcaacatcttatccacttgcatgcagaattatgggaaggccatggacgagttagctagcgaacgatcgagctgtaactttttttttcttctccctttcttcctcccatcgagtacgagctgtaactttctccggttaagaaaagcgagccttcgaaaaatattgcaccgccgcacgcaacgcatcaaaacgccactcatagtcaagtcgtttacagctattagaacctacgtaccactcgctaagttgcaggctaatccgctgttaatccttaattacttacacatctacatacgtacatacatacgcgtgtcgtttgatctttcgacgtgccggccgccatcgcggtaaaaacacatctctcctacaatgcggcggtggttaagcctaagagggctgctacaaaacgggatcccattacaacaagataaagcatattaactattctcttgcacgagtttcacaggtatcaggtcctagatatcataggtatcgggtaacaggtatcacaagtatcaggtaccatacagctagtaccacaacagatatcaggtactatcttatataagagtattccgttccaacaggatattgtctaggtttttttttaagcccaatcataaagcctccccacaaacggggtaattacctgcggttatttacccacggccggaccgccacgaatcattagctaccgctctgcgtccgacgtggcgtttcccggttggtcgagcgaggtggggcccaggccggccaatggggagggcgcgttgcggtctcgccaatcctcgtcgggccccaccccgcacacacacacccacctgcagcagcagcagcttagctcggtgtacgccatcatggcaggcaaagtctccaggttttctctacgccaccaacccgtattctactgtatttgtacacttgcatgtactctacccagcgtatacaaatacaactgtaaaagcgcaaaaaggctctgcgcagatatttttacagatcgtcctccgggcccaccacgctgcaaccctgtgagcaccatcgcctccgggcccacaagtcagtcacagagatagtattcagaatgttttttttttgagatcttagtatatactacagaaaggttgaggggacaggagcgtattggaatacaggtgctctggtagagcagcagatcagtctagtctgctcatgctcatgtgagttctgatttctggtgtacgtttttcctgcagcatgatcactcatgtaggagtatttgtacagcttgttgcagatctgtacatactgtggccctgtactgtacactactacagctagctagctatacaagcttgatgtagtagtatcattgaacaagctgaagaagtgcagagccagctaggcgtgttaattaatttaccagccacaggtgtttctgtgtggctgccattggtcacttggaagagcagcgaggttggaaaaaaggcgaaagtgataaaagggtgagaatttatccgtattttttttccagagaagaagtggtgatgtttggtacgagagacgaccatatatggaagtggtatacgtataataatacaaggcttgcttcatcagtatactaatggaacagtatgcctacttggatatcattgtttagtagttaagctgttcggcacacttctgctattgtggtcctgtagtacatgcatgcctggccttcccgatttgggcgttcaaaaaattaagcacgggagtagtgattaatccagttgatcagagtgttgtatctgagggaggttggcacttggcagggtgaaagtgtgatccaacagcaagtgatgtttacccctacgtatgtgtatcatttgaggatactgctttagaaggtagtagtaggataggtcgtcaacttcaacaaagatattggcagtgaaggactagtacacatacaaatatacagataggatgtggagagatgttgtcgtcttcgttctaaaggtagtgctgttaagatctagtgaaatgttgatgatgttcattgcaaattgtgatagctgtccgtaacctatgttgatgttgtttgagtcgtcatcatgtttgtagacttgtagtagctgtacttcactgatatatacgtaggtcatacaaatgcagctcttttattaatttctatcagggcatgtcttagcatcttactcctgtaattgtgcaaaaaaaaaaaagttgtccagtagtagttgttaagacgtcgaactttggggtagctgtcaaaatcatttgatataattcacattcagatatatcactaacggtgaaatctacattcttagttcatcattagaaatgattagtctcttttacctaatcacctaccttgtacactaatttatacaagcatgtaagataatgattaaaatcaattcacttgatcatcatgcatcgatgcaacattattgtacgctaaaatcaaaatcacgacaattgaaatacagtagagaagttcgtgttggagttttttttatccgcttaaacttttggattaaattggttgatatatgtaacttaatatgataccagaattaaagatcttaaattcaaattctgaatgagacacacttaaatacaaaaaaaattgtgcaaagtgagttagctcaactagttaggtttcttatggtggatggcccacccaggttctagtcctaggtttgacatggatacctgtatttacggctaattattcgtttcagtgataagtgacgtacccatcgacagcaacacacttatagtgactttgtcaatatcaaaatatgttagtctagtcttaggatgtactcatagaggtaaggtgtgcgcacgtgcggtgcgttcataggaattagtgtatgtgcattgtgagtgtctacgtttataccgtgttttagaaaaaagcaaagttccccgcacaaaataaaaatggagtagcttgagatctgatgagttcccgcacaaaagaaaaatggattggagaagtaaacaatctatggacctgggaggaaccagcaacccaaattgtttgtggcctttgggccatcatgacaccaaccccaggctagctcatgaaccaaatgaaaaggcccaacaaccccaacctcaccgttccttttctactctctctctctctctctctctctctctgatctcttatttgcgaggaacagtttttttttttatccttttgtacgtggtagctcaaacgtagcactctcgtcaacgaggatgcaacaaaaccatgcatgcatctatccacaatcatgtacaggtgcgctgcagcgtaattaatgccctgcttaaacatgtacagaaaccaacagaaatggtgaccgaaccgtgcacaatctcagtgagattaaactacgggagcagattacaacaacaatttgggacgaagctggcagtgatggtaaacgttggtttacctgtcaccctccaaaacaattgccccgggacgctgacgctgagagcgacggcgagtttagcctcgtggcatggcagggcgctgcaatagaagggaaactgaagtgaaatggcgctacacggttgaacaccaccacgcgacgtcgccgtcgcttggtcattgtagctaggatttttctcacatttttctgatctgatgaaatgtggcagtctggcagagagaactaaagttcagatgcccaggattcggattctgcactgcatacctgcagaattgaaggattttagttggctcggtattctcgtcagatcctttattatcttccgaatctacaggaaaatatgctgatgagctagctaggaaatatatcattctacgttatttgacttggtagtaaactagtaattggaggactacttcacagtgactggagggctggaagcatcagtggtccactacgactactgtccacagaaaccgtcagggaattgttataggaccaagtactaccataagcatccctgattcactaatcatgaggcggacgagacgagtatatatgcatacaagagaatctggacatgatgtcaatgcatggaaagagggaaatgcattagagaacaaataaacaaacacgaacatgatgtagttcttgcactggtgcatcaccgttctgctgatatagcgccctttactttagcacggttaccaaatagagtgccaaaggccaaggaatccatgaggcagcatatgcatgtacaccgttttgacgagaagaggagtactgcccttccgagctccattgagtcaggaaaatcgctgacaggaactagtcagcagcagggttcacaaaaccgccggggccggggttaccgtgccccggcggtaagcacggttaccgcgcggttaccgcggtaaccgtgaaaaaccgtacaaaaccgtgtaaaattcatcaaaaattcaaattattttttaaatttatttgaatttaggaggttaccgcggtatttacattaccgtacccccgcggtaagcccggtaaccgcggtaaccgcgcggttaccggcggttttgtgaaccctggtcagcagtcagcactcagcatgatcagcacgcaaaagctgaacagaatataatactacctccgtcccaaaataagtgcagtcgtggatatccatgttcaacgtttgaccgtccatcttatttgaaaattttgtgaaaaatttaaacatatttagtcacacataaagtactattcatgttttatcatctaatagtaataaaaatactaatcataaaaaaattttaaataagacgaatagtcaaacgttaaacgtgaatagtgcaaaactgtatttattttgggacggagagagtactgctcggtttagcacctgaaatcaaggagagatttgagttcagtccactaggcggcacggagttattggaaagcaggtgagtatgctctgttttgcagctcgtttaacatgaacgaatcatgatcactctcgtcagacctcttcagaggtaacagcatcttgagggattcacttaagatattgaagtgaagggagtgaacagtgaaggattctcagttgtattccccagtctgatggtagttgcctacttgggacagccgaatctgcgaggatcttcggtgatccggatcagaatttccatgtctgttccaaccgctatggatcggctgcatgtatcagcaggagttcttttttttaatgctacaattctccaatctctgaacatgtgaccaacaaccaaacagttttttttttcttttttcatagaaacttgaaacagggaaatcaatcagtggaatattagatcgaccacgatgcagcttatggcatactaattctcaaatcaaacatgcatgcagttcacaggatctgaggaatttaagctaagcattgacgcgggataatcttgaattcttgacaaaaataagaggagcagtttatgacagcaaatattcacattttgaaagtgtattcctcaaagattcattctacaatgttctgtagttaaaaccacaaagttccaatatcctacagcaaatttggaaaaaaaatatatgatgcctttagactcttgtttaatgttcctcttcaaagagtaggcaaagctagcagcaatgcaaaaatagcttatcttggcagaaacagtcattttcacgggtccggaactgagttgaagacagcatgataattggagagatcatagaacgaagttgactagtccctgttgccccagtttcagacgttcctcccaactctagtgctcgactgagggaggctaactttgactctactcccaatatatgtccttctaattcaggtcggttttagattgcataaattaattaaggcctaattatgctacagcagctagtaattagcacctacgattttgttagatatgactacacagatataaaatctttcgatttgccgcgtgtaagcactaaacaggacaaaagtactactctagtacttgcaatgggtcctttggagcttcatagggccagatttaagttctatattagttaataaacacagaaaaaaaaaacccaacgctagctataattcgtccaaaacaaatcgacaatggagtactacgcttgcacgcatgataaaagttaattagcaacgttaacaatcaccaaaacattgttttgaagtccttaacgtacgacgccaccatcggattggttggcttttgagttggctcttctcccactagactaatctcctgaaaatctaattaatctttgcattggcctggtccaagttgctgatgactaggattggcacgatcaacggatcaagcctagatcatgacgagagccatttgccggttgtcttctcccaagtaggcttgtttagcaaacttgctctatttgttttcggcaaccagccaaccacggctcttatcaaaatggaaaagggaaaaaaggtaaagtcgcaatgaagccatcgaggctgatcactgatctgttctttctctaccgatcggccggtacggtcagtgtacggctctaaagaatcaggcgagctcggcgttgtcgcgttaccattgcactgaccccagctaaccacttgtttaattaacccgaaaaaaattggacatggtcaccttcttgatcgctgctgactcattttttttgagagagagagatgtaacatatgcagttgatgtaagtatattattactctaatgctaatgcagtggttggccattaggtcagtgcatggcgatgcaactagcaactaggcagcaccagctagatgctcatcgtcggttagtgctactgttgccgtcatgtgcatatcagcagatgcatatggagtttgtttagtagcgagggagctgactttttgagatggcaagtgatcgatggatcgaacgatacgattcagggaagccctatcaggctatcagccgatggcgtgtaaagtatagaagacgctgatcaagctgtgcgtgctcctaccgttctaacgtacgaaaacaatatgctttttgcttgattaaaaaaagaaaaaaaatcctgccttttcaccctacatacatgcatgctcttgcttgattagaaaaaaagacaaaaaaaaatcctgccttttctccctacatgcatgtacatacatgcttttgcttattagaaaaaacaaaaaaaattaatccctctagaaaaaatatatttgatgtataggataagatttcgttaaacttttaaattctaaataatattatgataatatttattaggaaaaatatacgatgccactttttagtttctacactagcatttaagaaactacttataattaaagttttataagtttaactggtccgaaacattaaatatattttattgaagggatattgatcgaagagcaagagaaggataaatatcaataattatgtagtgtatctacatttaaacatagagcttacctattaaaaatacaagataaatagttcggggtctttaatgaaatgaaaggataaatagatttaatttccatgcgaattcaagttaaactccttgagaaataaaattaagaataagctacttgggagttattttcgtgttgtttgacagctaaggggccatggccagcttcctttgtgcttgcgtaactgttcctgttagctgcaacgctgttgcagccaggtagccgagcagttacaatttattttagaaatgttattggtaactaattattttacgctaagtatttgctttccttaaaaagttagccaatctctgtaggtagccgcatccagctggctggcttctccatctcatagagtatacaaatcgtgtttataatagtcctactaccactctcagttagtgccgtacggcacgccccgtaattttgaacggcaacatttcttcctaactctgcatctcacccaacaagagcacttcattcgtcaaaaaaaaaaaaaacaaatctgtgataggacatggaccaatcttaatatatatatggccaaattcgtaataccagaatattacatttaatatggagtagattggtttttaatatatgtatgtccaaattcgtaataccagaatattacatttaatatagagtagattggttttttatggaatgaagagagtactcaagacttgattatgcaataaactactggagtaatggccatccttgatttttttggtctgaactctgaagaaagatttcgcccacacgtttcctaccaataacatgtgaccagtccacgcaggctctggagtaccgtgcagggtttgggccatccgtaccgtaccagcagtccagtccagccccagtgccccactagctcactagcacacgattttgctaggttacacatggctttcgctgagtgcaagcgtatgtgtaaagacgtggatccaccaaaaggtgtggctctatttcaatcaaacttataaagccgattaagtggtctctgtagtactcactctatctatttttaatagtaatatttcatcttgtcacatagactaaggataagtaattctacttatcattcatataaacatgctactagtcattcctcgtaaacaagcgattcattgatatttacgtttctcaatgcccatgtagccaatcatgtgtggaagaatggagagtcatgcattaaatccgagaaagtcattaaaatgatatgttgttgaagtgaaatatgcttatcaaaaataaaacttttagatttggaaatatgactatctaaaatagatggaggaagtaccatttaaaggaagattaattgggttcactcgttttcaaaggcctacatcaaactttacataaagtgagagaaatgccctatatctcagtaaccagaatcttccaagtgcaaaaccgaactagtacaaagaaaggaaaagaatttgcacaatttctggccaaacaatccagcacaggcgcgagtgactccgatccgcacgtgtactacttgctttgctgcttccaaatcttctacgactactaaacgtaccatgatagtacatccaaagcgatcgaaaccggaaacctcctctcacgagtcaaaaacaagttaacatcacgcttggaaaccgggcacccgagccatctagcagtacacaagtgtaccactcaagagtactaccgttccatgcatccatccggccaaaacgccaaagcgcgcagtagaaaaccagcagaaaaaaaaaatcctcgcgaaagttgccgtacgcacagggatgactgacacggccgctctccccgtcgttgccacctccatgtcccctagcagactaaccggagatgcccccgccgatgtgaaaccgatcggcagcgtcccgtacgccgtagctttccgcgcgacggaggcctctacacgttcgccttcgcacgcgtgcgcgcggggccgtcgatggatggagcgagctaagaatcgaagaatcgatgacacgggcgccggtgtacgctccggccctccttcgatcggtttcttcctgccgaccttccacttccaaccaaggcgtcgccatcggcagtttgggtagatattgacgtgggattgtagtggtgcagtgcaaggggtgtcctttgctggcgttactgcgttttgctcgttcgagtgcgtacattctgatttctgcatcctctggctctgtcccgggatttggacgtacggcctacggcgcgtgtacgattggatggaccgggtgacggggtgagtgaggcagcttaaccaaatcgaactccacaagtcactgatgaataatgctgaggagctgcacggtcgtgggaaagtcttccagcgaattaaggacgtcttggttgagaggcggtatccaaatcaaccactacactaataactagctgccttcgtttgcattttgcacgagtttgagagagagcagcggggccagatccgcatctcgcgctttattcgtttctatttgaccggcgaaatgttactttggacttgtggaggattaatatatagaggtgttacctaaaagtttcagtttgcaatttgccagtagtgtgcatgtttaagaaaattatctacgggggagctttccaaattttatctcagggttgcatggtaaaaaaggttatccatgggggaactttcatactgtttgctcccaaatgctttgatgacatggatccatcagtacttttacggttactagtagtacatttctttaaggaaagattatcgcctctttcccccttgctcgctttgtcgacgcacttgcctacatcaacagcaccgctttttgacagatatgactgcgaaatatgatcttctaccgatttgctagtaatgtactcctacgtagtacgtaacattggatgcaaaaccattggtacaagattatcaaacggagggaattaaacggacgaactgtgtgtatcacatggaagagctcgtgaacagaacacgttgtagcactgtacggtacccgtcagagaaaccgtaaccgagtaaccgaccacgctcgggaggtcgccagtggccacatgaccgcaggtccgcagccgtcacacgaaccaatcatgcatagatagaaggccaaatggacaagcagacaccaaaaccaggctagaaacgagagcgagcctcgcgcacatgaaacccctccgttttctcggcctcgcacggggaaacgacccgtacgcgcgccacgccgtgtctgctgctcgtctcctataaaacaacccgttgtcacgctcgccttgccattacaacgtcgctagcttcttccgctcgtttagaaaacgccaccaccaccaaagtcaggcacccccgccgagagagttagctagctgcgcgcatgcaggcgaggcggcacagaggattccggctaggccggaagctgctcgggctctggcgatgggcgctctgccaccggcggcggcggcgcggccgcggctacctccgcctgcagccgtgcccgggagctgcaggcggccgctcccctctgctggccgccgggagcgtcaagaagcagccgccgccgccgcagcagcagatcgtcgtgcatcagcgtggtggggagaaggcggtgctcaagtgggggcggtcgctggcgcggcggatgaggctcctgcggcggcggggatccgagcggctcctggaggaatcccccggggaggcgacgacgcccaaggggcaggtggcggtgtacgtgggcggcggcgagcccggggagtcgatgaggtacgtggtgccggtggtctacttcaaccacccgctgttcggcgagctgctccgcgaggccgaggaggagttcgggttcgcgcacccgggcggcatcaccatcccctgcgccgccgcgcggttcgagcgcgcggccgccgtggccgccgcgggcggcggcgggaggaaggtgcccacctggtggtagcacgtggccaggccgcggccggtgtacatacatacacacgtgtcatgtgtgctcgatcgagtaggactcaaacgtgtacgtgtattctttttttttttggttttgttttttacttcttattgttcctcccctttctgtgtggatgcgcatccatctctgcatgcgatgtgaggaggcctagttagatttacagacggaggatgctactaaagtaatactataattctttttgactcgatcaacgtgttcgcatctttgcaattaggactgtgtttaattccacgttaaagttgaaagtttgaagaaattaaaacgatgtgacggaaaagttgagtttgcgtggataggaaaatttgatgtgacgaaaaagttggaagtttgaagaaaaaagttaaaatctaaacagggtctagacgaccatgttggagaatgaatgataaaacgtgaacgtccagtgagatcgatcctgttcatgatcttctttaatttgctcctccgcacgagcgacgaattatattgtttttttttgagaggacaaattatatgttcttgtactccataggagtagtgttgctccagttcgtgcaggaattgattaagctgtggagttctaacgatctgctacttcctgccggcttcctgacctccagtatcgctgaagcgtgtgcagtggtgaagtacttgcgtagtccgtacaaactggtcagtttggcgatgcagcaagcaacttccacgcaagtggcccgtgctgtactgttaagccttccgaagagatgcttgcataggccctgtttgaaacaaagaatggacaacacaggaacatgaaaatatacaggaataaaatataaggctcttttgaaacaaatgattttagaggaatttaatcctacgaaaaaatttcctatgtgatcatttgggtcaaagaaatagctatccaaaaattctgtgaaattgctttggattggctcaaaacatataaatttggaagaattctaacatgagcttcaacctctggggaaaaaaatccattgtgtcagtctctcttttcaattttttatgtttttaccgcgctccatcgtaatttctataggtttcccacatttttttcaatctataggatttgaggtgctatgacactgcaatcctgtatttttcatgcaattgtgttttgagaatattgtgtttccgaaggagcccttaatttgtgtaaggtaaaaaacttaggaattcaagtacatgaatagtgaaaattttgtgttgtttggatcacatggaaaaaaatatacgagagagacatacaaagccatgaatggaaaaaaaaactgagaggaggaggagaatttcctttggctcacacagtcacactgaatgcttttctttcctatggaagtggaggatttgctacctttatatacaaaggaattcaacaacatatttcctttgtcccaaacaggtctatagggaaaaattccaaagcaatgcaagcctctaaaactccttcaaaaatacattgttccaagcaggtactgtagctgaagccggaaacagagtgcagcttgtctgccgttgcagcggctccggggtcgtggtcactgcacctgcacctgcaccccaatttgagcacatcgcgtagagtaaaattcgtttattcgcttgagacatgagaaggtgtttggtatctgtacttctccatggcacctatcatcaagtgagagttcagaaagattttagtgctaatttgtaatttgagattaattggccatctaatcatcatctgctgaagttgttcgggattttggacatgatgagccatcctataacatcagggctcatcttctcattgagcttggaacttgatttttagagaaaagttcagaaacccggcttttaattgaaagccgcatagcttggaacttaataccatgaacgtaagaagtttctcgtctacttgtgttgagctagacgcccatggctcgtacaatgatacaaatgatggagatgtaatggactatgagggacaatcatgcacgatatacagtatgttgatgtccattctgaatcccagccccaatctgacttcctgtgctcgcgctatttttgcacgacggcgttacgctatcgagacgggcccggggacgtgtgggcacccggcacacaaaaagatcttactgatgaacatctgaatgattggcctctccgaattaattgctgaaactatggtgaaagttacaacaaaagaatgaacgcgattgacctagtaaaactgatcagaaaactggcgcaaaaacagagtagaggagcttctggccaattgaagacgacgactagtgggatactgcgttaattataactagcatggtggcccgcgcagattacacggctagtatcattatattttatctcatataatagcatatatgttttttaattatattattcaaatatattaaaatgacaacataattttatattttgcaataactttacaaaactactaatgtgtaatattcatattgtattttttatatgtgttagttattaattatttttaatatcaaattttagttatttgtaaattatatatattcctaaatggactctagactcgtcttttaatatttcttttttttatttcgaattttctgtaaattgtatttctatatggactctacgctcttcttccaatattatttatttttatttctgaatttttattatttctaattgtatttctatgtgggctctaaactcatctttcaatattctttaatttttaatttcgaatttcagttacttctgaattgtattcctatattgactttaaactcttcttcccatgtttttcttaatttcaaattttagttatttgtaaattattttttatacggactctaaactctacttttaattttattatatttattttaaattttagttagttttaaattcctatatggactctatattctacttctaatattccttattttttaattttgaatttctattattttcttaattgtatttctatatggactctatactctacttctaatattccttatttttaattccgaatttctattatttcctaattgtatttctatatggactctatactctatttctaatattccttatttttaattccgaatttctattatttcctaattgtatttttatatggactctatactttacttctaatattccttatttttaattccgaatttctattatttcctaattgtatttctatgtggactctatactccacttctaatattccttatttttaattccgaatttcagttatttcataattatatttctatatggactctagtttcctcttctaatattccttattttttaattctgaattttagctatttctaaattgtatttctatatggactctgttttttctttttctccgattaatgtgagaatttctaggccatgagagcgaacgtggaggctcctttttctattcctttaataatataatagatagattgttatggcgatgataaccccatccactggataaacttgtaagctactccctccatctcaaaatatttaacgccgttgatttttttaaatgtttgaccattcgtcttatttaaaaaaattaagtaattattaattcttttcctatcttttgatttattgttaaatataattttatatatacatatagttttacacattttacaaaagattttgaataaaacaaacggtcaaatatgtttaaaaaagtcaacggcgtcaaacatttagagaaggagggagtacttcctctgttttataatgtaagactttctagcattgttcacattcatatatttcccccgtttcataatataagtcattctagcattgtctatagatgttaataaatcagtatgacttatattataaaatagagggagtacaatatacctgttatggtgaggcacagaggaagttccttgaagaatctgagtacagtcaggacctatcatagtatcttgtaccactatcggaaaatttgggaggtagtacggagtagtatactaggactatgtcatttttgtttcctttccagaagaaattagttaagtttcttttttttttgaagggaagttaagtttcacaccagtgagcagctaacacactaatgaaatgggagaattatatagtatttatatactcaacggatacatcaagttggcccatcaagcagacttaacaacgggagtacattatgttatctatcaaccgggtctgtatttctttcttctttttttttaaagaagcctgtatttcttttttttttctttgcctgatgaataagaatcaacaagaaaaacaagcaccatggcccatgggatatcacctctaccttttctactctttaattgcaacaacgataggggaagacaaataataaccatgtgacgttaattttttcttcacgaacatacaaaaaggattacacgtagttctataagaataaagtagtaacatgttacacagcgtgacagtaagaagccatcgcagcgaggatgtcaaactaatatatatattcaatgaacttttgtgagagttccaatcccaatcctgcgtatctagacatcgactagtttagtacatggaacaaacagaacttctgttcaatctatatagtatagaaatcgatttgtgggacccactagaacccacacgtaaagaaaatctcagcctctcccgcgtcttcctctctcacgctcacccctaacgtttctttattcggttgtatgcgactcctatctggaactcgattttttcactgacacacatgattcgactcccacagtgtatttggtttggccttttcatgctaggttagatataatcctcacgttggatgtgctcttagacgcatctggctaggaggttcccctgaaaacatcaaacaggaaaaactatggaagcaggggaattctgagagagaaaacgacagacaactgctcttgtgcagtactcccttctgctattgcgagctgaagaatcccgtagttctctcttcttgtaagggtacatcatgacagaagagaatggtgcatagttgcttgaaggggacagggtcattgtccaatgtccacaccaggattgttcagattctgcgaacaaaggtcacacgtaatcccaatcccgtcttgggccagcatacataggcctcacggagcccgcattaccgttccggcccaacacgtataggccgcacggaggtcgagctcccgttccggcccagtacgtacggtggcgcgtggcttttggtcgccacggtgtacaggaatctctggtgcgagcaacgccgcaccaaccgtccgcgtcgtccgagataagtagcttctagacacgagagggcgcgatcaaaccaagccaaactaattctcgtatctgcatgagctacactggtcagtggtcgctgcacgctccctgatcagctacgcccatgcatctactcagcggctgcgtcgtcgccacggccgtcgtgctcgtcctcatcagcctcggcgccgcgccaccggcggccgtcgacgcggcgacggccacgttcatctacgcgggctgctcgccgtccaagtacgagcccaacaccgcattccagagcaacctcaactcgctcctctcctccatcgcctccaccgcgtcctcgggcgccgcctacaacagcttcaccgccggcggtggcgccgggccggacccggcggccggcacggccgcgtacgggctgtaccagtgccgcggcgacctgagccccggcgactgcgtggcgtgcgtgcggcagacggtggcgcggctgggcgccgtgtgcgccaacgcgtacgccgcgtcgctgcaggtggacggctgctacgtgcggtacgacgccgcggacttcatcggccgcgccgacaccaccacggcgtaccgcaagtgcagctccagcacgagccgcgacggcgcgttcctgagcagccgcgacggcgtcctcggggagctgcaggcggcggccgggtacaagctgagcacctccggcacggtgcagggggtggcgcagtgcctcggcgacgtcccggcgaacgactgcaccgcctgcctggccgaggcagtggggcagctcaagggcgcgtgcggcacggcgctcgccgccgacgtctacctggcgcagtgctacgtcagatactgggcaaatggttactacttccgccctaattcaggtatgcgacattgtaattaaccaaccaagcatgtcacgtactactaatcgcgtgcacgttctaactattcatttcttcctataagttggaataatagttaacctttcttattataatttatatcgaacattttttttagtatttggagaagtttgaagtgcacgaataattcgaatatttagtatttcaaaaagcaggggcgatccaaatcttaaaagagaacctgtgtgtaagggccctacctaatgggcaaaatggtagtagttggctagatagtgatcactagtgagtgaggtgaggtctctatggaagtgagaataagattccaaactggtaaacttccaaagctgataaagaggacacgaagaatatattcaccggcataaacttttcgacccttttggatcgatgttaattaagtatttaacactcaagacttgatgaggcgttctagctcatttagtcgtctagcttagcgctttttagccgctatggagaaaagctagcgcgcgtttgctccccgtgcgtgcgtgcggatcgctttgcatatatatggttgttaattagtcatcatctccctttggcttggtgacagataactctggagacgatgttgggaggactgtggcgataataatcggtatcttggctggactggcactcctcgtggtgtttatttctttcctcaggaaagcatgtaagttctctgaattatgtccacagagagatacactttaatatagccaagtagctaaccaattttccaatgcactatacgcaggttagcagctgtcggcgtagccagcttgggttgaggacgtgaacaacaggcgatcgaactccattcacggcatcgcattcattttgttagttatagcagagattcactgatgctctacttgcctgagatgcactgtcttgtttcagtcggtctgcagtctgcaaagaaaaagaggttgatctgcgtgtaacgtaccatttgtttgggttgcactgaagattggagtattgaactgcaacggcagttctctcctcactgccgagttcagctacaacttactccatccgtcccaaaataagtgcagttttagcactgttcatgtccaacgtttgaccgttcgtcttatttgaaaaaagattataattagtatttttattgttattagatgataaaacatgaatagtactttatgtgtgactaatttttttaatattttttataaattttttaaataagactgatggtcaaaacgctgagcacacatatctgactgcatttattttgggacagggtagcactttcgtacctacacaattcacatcttgcttgctgcgctggagattgaaacaatacacgtaacgtacggccgcgttgccagcccactacaaatcaccatggccccgtgccctggcccacataaatcctgttctcgaccaactagaatgggcctcaggtaagtcgcaattcgttcccagcccactacaaatggcccaacgcaatcctaaccatgcagggaataagtccactttaactcccttaacagtgacccgaatttaatccatgactctcaaccgtaaaaccagataggaagtctatccggttaaagtgcactttctatctagttttacagttgagagtcatgtattagatttaggtcatttttaagggagtcaaagtagacttgttccaaccatgcagtcccccgagacgggagaaaggagcagccggactcggtccactaaaagaagggttaactggatcgagcgcatctcaagcaagcagagcgcctcctcttgccgtccttcgtccaggaggacttcagctgccgcagcagcagtggcgcaggtagggaggtgccaaagggtgccaacaccctcctatctaaacactatcaccattacacccctatgtttttactctatattaagttagctaagataagtatttatctagtttattttgtatagtttgaaagtattatcagtttagttagttagcaagtctaaaaatattagcaaaaaacatgatatacaaaattagtttgtgatttatcatctttttcaaagtaaaataaatgatacttatttgtaagattatttaatagtttacattaaaagaatttagcaaaaaagactagtttcaaactttcaatgatattattaaagagctaaaattcaagtttttcttaaagagctacgtattgcttattattgacggtgactatttaacctactttactatgtaaaaactctctttatataaaagctgggccatctggccttctatcaaaaaaaaaaagttccagaaatcattctcgttgaatcgtagtatagctcaaatatgaatagaggtagaaattaatgaccagaatttactttcccaattagctagtaagagcatctatgataaaatccatcagcatgatataacatgaatggaggggaaatgtgacattaaattttatgaaggataaaaaagtgatatcatgcagatctagccaatggctaggcagatgaagacaaacaggagcattgccgtttgctatacaggaggaatgagtacaaccaataaactcatcccaaagccacctgtttcaaccttgtgagccaatgagctgatcagctgaacatgggaaaatgagggaagagaagtacctgattcagcaagaagaccccatgggaacagaaaaaaggtataggccaggaagacacgaatgaatgggctgcttgtgtgcaatgaaacaatctcactgaaggagaaacaattgtgtcggtttgtgtccaataaatcaagatgaagattggcgaatccagctgttgtgctgcaacaattagtttcatagaaaaaggggaggctaaaatgcctgctaaaatgctgcatcgaaccgaagccaccagatgagttggacatgattacatgagcccttttacagatggaaaccgcgctaacaggggaaagggatttgatggatctttgtatctggaccaggaagaaacgttttcgtgggtatggatgaacaacttgttagtgccattgctaccaggtatacatgtatcctgtaggatagtagttggacgtgggtgtagccgcgtaggcgaacagattgattcgttgtgttgttgcttgtttgtgggagctcagcatgcaagaagatcctttaatagctgcccttccagttcttttcctcttatattccttgagaagtggaagaggctgttggtttcgcagagggagagaccgtaggatggtggaaccatggaagatgaaccaaatgacagtttttgatcgagccatcaaggaggaggcgaatcgatgaggggaagaggactcgacaacgcacgatggaggaaggaggaagaggaaaggttcactggctggcccaggtgggaaaattgggctgggctcagcgagcaagagaaaaggtctcgaggaagcaatctgcaccgttaagaacgtgaatccaacggatggaattaagtggtgatgtggcttaacctcaaagcaggaaattgctaataactatactaagtggggatgatttgtataggtatataggattcggtctaatggtttatctttactccacaccctctaatctcaaatcttggcttcgcccctgcgcagcagcctcgtcgttgttgacatttccgccttgctgcccacaagtgcgcccgaggttgacctaaagacgcactgtctgaagaagttagcaccccctctgtcccttgtgtgcctctagtgctcccgatctgggacgccatggccccaatccagccattgtgccgctgccagcccttagattgggcttcggaaagcaccatttcgacgcccatagccaggtgaaggacttcatcgccatcatcctcctcaaactcactctctcaccaccctgaaatggttcagcttgtcttcgagtggtacatgtttctcgtgcttgcgcccaacgacgaggtgatgaggtgatagggagagagaaaggggaaggaagaagaggatagaggaagaagacgagagtaatttgataaaaaaaatctagaaatttcagcgaaagggtaaataacgatacatctcgaaggcatgttaagttgtaatggcatacttccaatttcttaaataataatgatattttttcaaacttgtaaatttataatggtctggatttaattaacccttaaaagaatccatttgccctacatgggttaaatccattttcaacccaaaaacaccaaaccaaatccaacccacgccaatccaaatatccaatccatttgaggcagcaatctattttcatccaaccaaaggcaatcggaactagaaaccagtctatttaacccattctaacccagtccattagcaggcctatatgaaaaccggaactagaaaccagtccatttaacccattctaacctagtccattagcaggcctatataaaaacgctcagaggtcttcttgctaccttcacaaggtgatgtgttagataacttaggtttaaaacctcacccctcttctattcatttgatattaacgagttgcgacgccgcagcaaagttgtgctcaggcgaacttcattcagttcgaaacacaagttctaccttgctatctcgatctcagcattctcagctatcaaatacacgatcaattcccgggcatgtaaaagcacacgattcattcatatactcgtatatacagggcatctatattgcacacatagaggtacagtagcatacagcggtacatccttggacggttatttgcagtcctgaaggtattgttttgaggaagtacgagtacaaggcataagttttgaggctatatcacgtgttgcggcagatcaagcactgtacccctgcaccagcgagctccatctacccgagttgtgactgctgcaagtagcgatgcttgcttccttcattgaagcgccagagataccgttgttgcaaatattagcaaacgccctcatgtgcttcataccgtactgagtgagcggtccgcaatgcgactcaaagatccgtacctgaagaaactcatattaaagtcagacaaacagaaacaatggaaactaggagatttcaggacaatatggaactattggagcgcagtggagtaatagcagatgtcagttctcagtaagccgagtataaagaagtttccaactttaccattctcttcaaacaatcccaatcatcaacgagtggctgaccagaaggtctaacagcttgaagcacagaaggcccatttccaaatccaaagagaagttttccgacaagatcaacactgctgtcaagaagcttcctatgcataacagtgtcactgatctccctcagagctttcagcttctcttcggacttgtcatgtaacagctcatactgaaaccaaacaaagaaataaaattagcaaccataggatggaagcacatgactgaaacaaatgcttgcccattcacagattctgcatttaagtttggttcgctaatagtctagtgcaattgttctccaaatggcaacaggagatacttttataaaaaaaaatctctctaagataatactccaatgaaaagaaacttgcgagcagcagacagcagcacagtttactagaaacaaagatatttagctgatgtacactaccaagtaatttcaacacgtcataatgaacttcagtttagaaaaatctctgtaggctggaataatttgtgacatcaaaacaaatgcaagtgcactccaaccatatggttgtatagaaaggggattagataatagctagtactggtaagtatttttggaaggaacataacaaacaacaaactaaaagtctgcaaaagaatagactaggaaatacccttctccagaggaaaagaagatctgcatctctttggttgactgcagcctttgggccttcccatgatagcttgttcttaacttcggcatttgcagggtcgaaaccttggtataggtaaagcttgtcatccttgaatgtcctgtccccgtactccataacatgagagccagcaccgtagctgttcatgtcagaggtacgcttcttaacctgtcaacaatgctgtgactacctgggagtttaacaatgaaaattggaaaggtacagagcaaatcaagacttaccacttcgtactgcttcttaattgattcctccttcagattgtgagtctcactgccaattaacatcgagataaattttacatattatagagtaaatactttgcaaactgcatagaaataaggaacattaaagctgatatgtatggaaatttccaatgcacataaatacacacttaacacaagatatgcacatgttcaatgcatagaaatacacacttaatatcctgtcccatacatttaagctggtcccatgcatataaatacacacttaatactccaattatcatttaaaaatgatgtacaatgatgaacatgctttggaaaagaatttggaccttgtgtcccgtgcacgaggaaggagtgcgtacaggtcagtctctcaacataaaagaaaaaaaaataatccttctatagatgaccacataacatctgcatgatgcaataaattaaatagtttttaccatttatagtattatcttcagatttgattattaaaacatttgccaccgaaagttctacaagaatgtacgaaaaaaccacaaacggcattgtgtgcaatatgtaattctttacatttctaaagatatgtgaagctacctgtcttccatccaagaaacgctgtataggtcacctaagcaggtgatgtactcggaaggaggcgatggttccattcctgggcagtacgtcccccaactactctcttctgcattagacgctgttgtgacataaatattaaggtcctctggcatcaaaccttcgaaaatactgccactttcacacgcttctacatatataacctgcacaaatatattgcttattccatccaaggaggctcttccacaaataagtaaccaagaaaaatcttaccattttagcgtaagtattggaggcatgtttttcttgtaacaccttcatgaagtcagcagcataaagatatggcagattgggcatacctgagaattggacatgtcaacatgcatgatggacaaaatttaactcaaagagcaaagcagcatatgcaactatcacataccaagaactccaggacccccatgatcagagtagaagataaatatgtggtcatttggtttgctatctatgaccttcctactacccccagtaactgcagttttattgcccaagagaaccgcgtaaaagttttttgcagtgacttcgtctccagtgtaatcctggaattatagagtgtgttatcttcatcaaacttagagaaaaaggtcaatatatatgttatgcacttgtgccatgtacacgcaaatctgaagccacctgaagctaataaagaagtgcaaaagggtaaataattggacataagaccctaacagtcctctctccagcccgaggaacgaataacagtgaggcagtacggcatcgtgtaataccttcggaactcctgcataaacatcttcaccctgtggatgattgacaataacccctggtctcgggttaagtatattattggcaatgtcgtcatacataaacacgacaatgttctcctcctttagccctcccttccgtaatatctggtatgcatggcatacatcagcctgcaaagtgcaaacacacccaaaaaaaaaaaaacatcaaacctcaagcaaacagtccttggagaaataaaccatttgttggtctcaattccttctaaatttgaaacgaaacaatataaatacaaacttgctatgagcctgtctctttctgctacatatatttcagtaaaaattaatcactgaagtattagccactaaatatttcagctgatatttctttcgtattaaattgatccctccattttaaactcatcatatgttgtgccattttttttctcaatctgtcttaaacatggatattactagaacttagaacccagaaaaaattgaaaacttcaaattcgtttgcttatccagaattatattgctgctcacgccattttcttccttgaaatgagtctaggcatcagtctgttgaacttcctgacaaaaagactaagtacaacttggatagcgatgtgtgcaaatcatgctgagattgaactactagcactctgcagtccgcacacactcacatgatcaaacgtacatagatcaaggcgcatcgtcaggggtttgacaccatcgcaaccttggtagcatggacaatttggaaggagagaaacaatagagttttcaatcaaaccagcagatcttgggtggacatcgctcgggccatgacaggcgaagctgatctttgaaggctggctagggcagccattcctagcgtagtaatccatgcggatagggaggggtcgccaaatgattttggagattaggctttagtactcttgatcctctcctgtatcccatccccatcttgttttgcttttgttcccgccttatacataaactttatttcttcttaatacaatgatgtgctccttgcgcattcccaaaaaaaagatcctggggctgctttcagtagttcacttctcatcaagcccaaatcgttaacttattgctcagttaatttctttttttttgacggaaaattgctcggttaatttcagtactgaaggcaaaccttttcgttttcaaaagctaaaaaccgaaaattttggagcattgaagtactcatggcacgacaaattgaacatataaatctttaaattcatgaatactaaagatctcgttacgaatgatctgaacgactttcagaaacggctgcccatagctacacagcctcacagcagttccacgctgcatcatcatccaagccccccaaatcgagctccagacgcgcacgaactaagcgacggcgaagccgacgacactggagtactggacccgtgcgcttacctggtgcctgtagttaccgtagccggaggagcccgcgacgagcaccgcccacctcgtcccgacgccgtccttctcctcctcctcggtgccctcgctgccgcgcggcacggtggccacctcctcctccaccacctcccccggcatccgaatcaccggctcccacgtccgcttggctccggcccccgccgcggccgccgacagcgccaagagcaacgcgaagcaccaccgcgccgccatatccctcccctcttctccgcgcgcgacaataccacgcctacgactctacgggacaccgaggtggttgaagggaagcaccgaagtaggcgccgcgccatgccgccatgcaaggagggtagcctgcggcgcggacgcgtggggcgtgaggtggacaggtggcgccgccgccgcttcgtcgtcttctgcagccacggcaaccgccgcccgccgcctcggcgtgcgtggcccagcccaactaaaacaagtcaagccgcgaagttaacacgggccggaccaactgatgagaaaccagcccagcccacattggagactgtacggcggacaaagcggagagttacatcacgctaaagagttcgcttccatgaggagaaagcgtaataagcgttaatagtactaagcggaagcttcgagaacccttgagagagatccgacggcccacgccacgccgcaacaatcatagtggtcgccgattttataaaacttcatcttctccgagaccttaatcccccatctaaccccagacttttcctcccctcctccctctcctccggccccgccgccagagcccttccagaagcttccggagcccgcgccgccgatctgatcgccgccgcgtgccatggccgacgaggcgaaggcgaagggtaatgcggccttctcggccggccgctacgaggaggcggcgcggcacttcactgacgccatcgcgctcgccccggggaaccacgtcctctactccaaccgctccgccgcgctcgcctcggtccaccgctactccgaggcgctcgccgacgccgagaagaccgtcgagctgaagcccgactgggctaaggggtactcccgcctcggagccgcccacctcggcctcggcgacgccgcgagcgccgtcgccgcctacgagaagggcctcgccctcgaccccaccaacgagggccttaaggccggcctcgccgatgccaagaaggcggccgccgccccgccgcgccgcccgccgcccagcggcgttgacggcataggccagatgttccaggggcccgagctctggaccaagatcgcctccgacccgaccacgcgcgcatacctcgagcagcccgacttcatgcagatgctgcgggatgtgcagaggaaccccagcagcctcaacatgtacctctccgatccccggatgatgcaggtgctcggcctcatgcttaacatcaagatccagagaccagaggcctctgaatcgtcgcagcccagctcgtcgccgccgtcgcagccgcaggagcagcccgaggcgaaggcgagggaggtggagccagagcctgagccggagccgatggaggtgaccgatgaggagaaggagcggaaggagaggaaatcgtctgctcagaaggagaaggaagcggggaacgcagcttacaagaaaaaggacttcgagaccgcgatccagcattacacaaaagccatggaacttgatgatgaggacatttcctatcttaccaaccgtgcagcggtctacattgagatgggaaaggtgaggtttatgatactttaacattcaatgcactgcttgctgatttatgatctctttgagttagtccattgctaaagataaattgctttgctttctgtagtatgggcctgtggggattgatagttgttcatttgtttggacttgcaagagattaggtgttgacccttaaatgcatattggctagttattgtgaggattacctgtttattgttttgcttaactgttagttttctgaactagtgtaaggatggtcgggttctatatatataagtgactagcagtcatgacaccacattagggcagttgataaagcctacaacagatgccaagtaaattaaatatttatgttaaccaagtgatgcaaacacatcaaatgtcctgtttagtgtcaaaagaagattgaattttgtatatttatattgcttgtgcttttgttagttgatttatctgcagttcttactgacttgcaagttaactacttgaggatctttccacaacatctagttagatctctgaggagtaattccataggtggtcttacaatcacacaaaacacatgggattcagaattaatggaaagctcaagattaagagagaagaaagtcataaacgctacatacaaacctgattgatatgatccctatgcgaactttagataaagcattcaatcagccttaagctgtaaatgcattcgttttggtctatttatttagatttagcgacttttgaaatttatttatgttgatcctagttctactggtagctctgttatacttcctccgtttcataatgtaagtcattctagcattgcccacattcatataggtattaatgaatctaaatatatatgtgtctagattcattaacatttatatgaatgtgaacaatgctagaaagtcttacattatgaaacagagggagtacgtagtagttgcaagcttatatacttttttttttgtgatgcaagttagtagcaatctgcgttatgtctactatgaccattgaccatattactgtacctaacgatttgaacattatatcctggggaaccaccgctattgttttgtccctctcctgagaacctcttcaccaaaagcttgattcaatctacttgttaaaggtgaacttgaatagttcatctgaaacctgaatttcgtctttgctcaaaaagagcttaatggatttcaccaataaaagttcacgcagataggaattattgtgcaaattgttccataggtcataatcgaaaattttgttgctagatagtcaccttcaatggtagttccatgttttctttaatgagtatgacattatgcctctatgcaagttatgtaacatgcggattcttgtaaacaacatggttgttttcttctaatttgttctaatatcacttgcaaactccagtacgatgaatgcattaaggactgtgataaggctgtggagaggggaagggaacttcgtgctgatttcaagatgatctcaagggcactgacaagaaaaggaacagccctagccaaacttgctaagacctctaaggactatgacattgccattgagactttccagaaggctctaactgagcatcggaatccagacactctaaaaaagctaaatgaggctgagagggcaaagaaagagttggagcaacaagagtactatgatccaaagttagcagatgaagagagagagaaaggtatgggatccagtagggtatcatgctgtcatctctagttctcccccctgctttatttatgtcctcacctgtcccttgcagagatttcccttgctgccatattttttagagttgcaatgtgccatttgtaggttgactggctagctaatccttatggtttgtaggtaatcagcttttcaaggagcaaaaatatccagacgcggtaaagcattacactgaggctatcaggagaaatcctaaggacccgaaggtaatttcttttggccctattgcttgaacttgcttgttcgaactttggaaatataaataatgtactcggtttcttcattttcttgtgttttgaagtttgacttggatcattgtttgtcatgtgtgtatgtgtgagtttcaactatatattacgcaccatctaatctatctgtatgtatgcataacaaaaacgtcttttgtgtattactgttttggattgctctatatcatcattatcctaaattactgtcatttttatttatcacctgtttgcatgcatcccttaacataactgcttggggtttcaattatctacaggtgtacagcaatagggctgcatgctacaccaagttgggagccatgcctgaaggtcttaaagatgcagagaagtgcattgaactagatcccaccttctccaaagggtatacaaggaaaggtgcaattcagtttttcatgaaagaatatgacaaggcaatggaaacttaccaggccggtttgaagcatgatccgaataacccggaactgctggacggtgtgaaaaggtacagaagcgtcatagcacaaatcactagtgatagttattcttatgattgtatcctctttgctcctaatgagttagggcatcgcatgaatccgtctcacctccttgtttccccaatagaatccaagcgcactcacctttttgtttgcataaaccaactctgaactattgcacatgtttgcaggtgtatcgaacagatcaacaaggccaacaggggtgatttgactcaggaagagattcaggaacgacaggtaagcctgttgcacttttcatgccccttgttgctttaaaagttaaatactgtacaactgtattaactggtccttttttttttgtgtagaacaaggctatgcaggatccagagatccagaatattcttacagatcccatcatgcgacaggtaacacagaatatttgttcttagctgaaatttagatgtcagttcataaagtatcacaaatacctgtctgtccataatcttaatgatatcgaaaatgttttgcaggtactggtcgatttgcaggagaaccctagggcttctcaggagcatcttaagaaccctggagtgatgcagaagattcagaagcttgtaagcgctggaatagttcaaatgagatagtcgaccaaagcaagaagcgctgttcgtgtctatgttcattgctccttactttttttccatgctcagtctttgtggacttaagatttacacagtttggggctaatcttcattctcaattggattatgtgagtgcagcgtgtcactggattattagtggttatggcatccgtgctacagctgcacgtgcaaacgtatgtctctatttgttagtcctaaacattttccctaccgaatgaaaatagagccataagaggtgcagaaatagtcgattgcttttatttactgggtctagtaaagtgcatatattcgagcgttcaattttttatcggttttggtcatgggtctggccattccttaatttttcaggtttcatttgtgattgccgaacatgatctgcgttttgaatctctagccaccacaattctagacttcttgaaaggatcttgaggactatcctcgttatgtgccaatctttgaggaagaaattcagtttaaaggcatttcttcatattggactgcaggtttttacttctaggagcactaatagggtgcccgttgaaaaatcacagaatgaaatgatattgaataatcattgagtgtacactcaatcggctgtaacacctaaatccaagaaatattattgacgagttctctaacctcgtcattgagtgtccctagacaaagaagacaactttgagcttaaggtctaaaggtcttcatgcaaagcattttaggctgttaaccccttagttcttcaaattttgaagacacaatatgcaactaataccattattgaataaacaatatgggctttctaatatagttaaacgaaaaaagagaaacgtttcagtgcattctgagaccaagtatagaaatatatgaactccatgacataaaaaggatacagaagattttctgaacaacatgaccagtgccaatgggcatgaattaagcatcagctcattgtcctacccagatcggggtgcgacatagaggagtgggacgagcgacgaggccttccccgacgatctgaacgattatggacaacaggatgactaattagggtttaggggggtgggggggggggggagggatggagtttgtatctttttagattgtgcgttacgatgatggagatcgtgaccggcgtaggaggcggtgacgcattggcggtgaatcagcgggggtaggaaggtccacgagggggagagagaaggtggatctcatgcgacggtggtggcggttgagggcggaagtggcggcggtagggaggaacagcgataagaaggagatgggcaacagtggcggcagcagaggccaacaccagcactatgggggagatcgatgcacggggcgatgggtgatccaggccgttttactttacatacagtgaaattgacaccgtgctatgccaattcattaaaaagaactgatggattggattgaaaatggaagattaaacatcacgtatttataaagattactgccatcgaatcagcagtcggatcaattactgctgctttaaaagtggaatccttctttcatcctctcctagcctctctaatctatactacttagaaaaaccatagtggtggtcttgatttctaacgtagcagacgtatcaggtagacacgtacaatcacaaccatcggttcgccagattgaaaaagaccggtcacagaatttgagagtcgctttgcatggagatgttagcgatgtagaaaaacagatccattgcacaagttgagagtcgttttgcctgtttcttgattttcgctagcgagcaagataccgttgagagctccttgggtatggcttccagttaacaggtttggcttggtcgcgagaaatcacaatacgagcatgtcccaaattcttatgttcctttaggttagttcttgcatggaaagcattaagcatagctgcaaattgagtcaaattggaaagcaagacgctaacacgtttctctcggtgaatgtcagttcatttcgatctcatgtcaagcaccatatgcctaactgaaaatacagcaaccctcctgtctacatgagctagcgcccgtagtacgtatgcttttcttagaattcaaacaaatactgatgagccattgctgtgagatgtcaaactgcgtgtacactcctcgcatgcttgcgatgctagatttgactaagatgtactaaaggactgttcttttctgctgctaggatgtcaggatgagttattccttcgtttattatgaacatatttttcaaacttcgaaataatgtgtgtgtcttttaaaaaattgtatctaagttttcttaaaatatcaaataaatcaatcttttatattaatcgcacgtcttgttttttctaccaccatccaatacctcaggcgagcagcacttccgtattccatatggcgttggcacttggcacaacaatgcggccataaacatgtaatttgaggggattttgggtcctctgaggacacccgcaatggttatttataggctctctacaaaaaatttatgtcaacatatttttctacttggaaaagattaaatgaagagagagagcaaagctatctactaacctggagatagtctatagagaaaaacgaggcaatggattagagagctatagatacccatatagacatactattgaaatggtttactattaatctagtctattgctgagatgtacatgtttttagatagcaccttactttaccattgcagatgctctaacattgtatagtaaagtcctttaccattgcagatgctctaacattgtatagtaaagtcagaggaaaacagtatttatgacttgaggatgcaataaatgaatgcgatagacgtgtgtacagccttggtgtacaattaaatggcaaattagatatattgttgctacagtaagctaggggaaaaagtagcaacagactcaaattactgcgctcctctatgttggttgctctaagccgatagagatatggactaaagttacgaaaagatgatctcactttgcaatgcataaccaatggtacatgaaatgtaagcttcggtttctcttattgttcagctgtccaaaagttatactcctttcatcacaaattaatcatcatatatatttatgcaccaagaccaaggataatttaaatcgcatcaattaagataccatgcacacattttttcataatgcttgcatcgataaaaacattataccaattacaccctagcacgcacacattctcctatactgcattaattgtattccgatgaaattcgtgtccatgcagttatatgagagcaagtttaatagtatagcacactactagctccaattcatctatagtcaatttaatagccaattcatacaatagttgcttactatactgttaatatatggtctcacctgtcatacacacattgcatcttggagttcgtgctgcagctagctatagatctgtagcccgctgctcttctctcatcttttatctcattaaaatatgtttacagctggctaatagcctgctattgtacctgcgctgatgattaatttgagaaattttggattctattatatgatgataaatttggaaaggatggaatatatgcttgatgtatatggaaatagtatcatggtgggtcttaccaaagtgtatgatatgtttataataaatatagtaagagagggtattaaggtagacctcaaaatccaatactagacattaagagagggagagagagagtagcactaccacgagagagtggagattgatagattttttttttttggtcttaggagtggtctttatacatatagttagctcaaccaaatgttttttttataagaactactctcactttagaggcttaagacatccttatatctgtattgtggctaccctaatgatgaactctgacaataaggcgatggaggatatggtagcacggatttatccttcaagaattgggattaaattgattatatgtgtaaatatcagctcttttctttttcaaatggctaatcaaatgactggtgttatattaatgggttaattggatctatgatattgtaaatatgtcatattagaaaaataccactactatttgcgatatcggctacgtgccactgaaatttggggaaattgaaatcatgccactcccatcaagttttctgtcaacctctgtctaacccccatgaacagcgtcaaattcctccgtctaaccccatcgaagaacatcgtcgcctacaccaatcggtgctggatcgattgtcgtcggttcatggaggaggaggaccacgcggagaccaaccggtgagctctgggaaggtccgacgtggcgacactcggtcgggtggaggggcggcacgacggcgatgacctaaaactctttcaccaccgccaccgccatagacgattccggcggcccttctcgccgaacctgggtggagctcgagcgaggcaacaccactaccctccctcttcctctcatggcagaccggtgtagatgacgcaatcgatgtggtggtggattgccgcggactggaggaggtcgacggcaacggcaacggctcccgagccctcccgccgcggatgggaggtggtggaagacaactgtcacaccctaatctggcaccgccgtacaacggcacctgacaggagcgtgtcgtgggaaaaacggcgcgaaccgcttcctacgaaaccgcgatctcagtatcagtcccaggacatagcgctggtacccacggtgacaaatatgaatcattgcaatccttaaaataaatagaggacttatttaccgtaacttaggttgcagctcagaacagcccgagattgcaaccgacgacgcggacgaggaaacaccaacaacagcggcagcagcagaaccaacggactaacacccaacaccacaggcgacggctgggaaccaggacgaaaccctaatcttcactttacttcatcttcaacttccgggcggaggaactatatatatttatatagagcaagggtgagtactttcgtactcagcaagtcacgggaatttaggtgtttaatgcaagcttggaagagaggcaaggttatttttgcaaatcttttgttttgaaatcattttgaaatcactaagtgatttatttctttctaagtttgggccgaaaagagacttgcgtctcgtttcgaccttaagagatgttttttaacagctcatttagtaatgtaccgacctcccgggtcagatcattacttctcggctcccagagccattccacttgattaatcggctcccagagcctttttcattttctcggactcccagagtccagctgcctagtagcacaacaatccgcttctactcgagaagcctagtctatgatgccggtagacatcccgaatcacacagattcgtttcttgaccactcaggtcatccatctaccacataggctgattctggtaacgattcccacaccacaacaacttttcacaaaacacaggcaaacaaatctacgctacaggaaacacctcacatccgcccatgaccgcgggcacggctgttcgaacagttagttaacctctgcagagggggtacactttacccacacgacattactaacccggatcacccagcccgtgagatcagccacgtcgggagaccttaaggctttcatgacaaggcatttcgaaagccgacacaggttcaccatatgccaacgagaggggtcccagaccaacaccagattaggtcccagaccatactgtgccaggaagcccgagggttctccccgacaccaccccgttgaatccacaagtctcttggcatcatggctcccccgattagctaattactcagccaggggcgtcccattgcacccgtgtggtcgcacttattatatgctcggatgaatttcccacaggaatcggtccttatatgcgaatacaggacagtaccacataggcacaacccccgcatcgtgagttttcacaatctattttgttttcaaacacaccgacgccacatgtcgggttttcaagacttctcaaacccatttcccaaattatcgacaaacaacggtgtatgtggaatagttagtatacgcgctcagagaacatggataccgaagtaccacaaaggtggaacgacaaggaatcagggtagaacaacctacaggaattagtgcgactactgggtaggtccgtcggtttggcacgcaaaccgaggccaagcaagttaagtgtgtgattctactaatgcaagttgcaaacaaaataataatgattttccaattataggatcaattggtcaaagggtgacttgcctcgctcaaggtcttcacggagcttcacgaatcttcgagaaaacccgcgatcgacaaaaatctgataaccgcaactatacgcaaacaatcgaaaacctaaacaaaagaccaaaagaaagatcctatttagactaattagtagtgccattagatagatctcaattttagagaattactggaagtgtaacggagtcaatcggagttacggatcgagagatatgaatttgaagtttatttggaatttctggaataagaggaatggtttatggaatttatagaaataatattctcaagaatattattgacagtcacagacgcgcgggaccaaaggaaatgatttatggaattttgggaataaggaattgatttatgaaaaagggaaaaggatttattaatcctttggataagaaaaggaaggagggatgggatttagacttccttgggcggctcgggtacggcccaagggataagcacggcgcggccgagccaatgggccgggcgcgggcgcgaggaggcggcccatggccgggcaaggcgcggcccaagcgggcggggcgtgcgggaggagagagggggatgggtccgggtggaccggatccatcgtgctgggtctcgggacgggcccacgagtcagcgactcggcgcacgggggaaaggttcatgcggcgcggggtgctagggttttgcggacgcggctcacggcgcggcgcgcgggtggaccaagaggtggagggcccatgtgcagcctaagggctctccgtggaccgcgcgcacagaagaaagggcggtgggggcggctgactaggtgcttgacctggttgcggccgatgtggcgccgacgtggcgccttcgtggcagccatgcgggccggcgagaggaggaagaaggaggccggccgagacggacggcggacggcggcagcttcaccgggagcacaacccgacgattcgagagggagggagtacaccggaacgacgatacagaaggaagggggttgatccactggctcggattcaccggaaggaggccggcgacgacgaatcgcggcggcgcttgccggcggcggctaaagagggaaacgacgacgatgcgacgagagctcgattcctagggacttgagcatctacgagacctccagagttcatttctagagtcggattgggtggagctacaccgaggaaggccggcgacgagcagctactaccgagtttgggcggcgacggtggcgagcctacggcgagcagctgcggcggttggggcggcgccagcttgctactggaaggctactcgcactactgcccagagctaaggagaggagagggagcgaggagggagaacgggagatgcactaccgagccgagacgggcgctgtgtcgagcggccgacgacgcgggagcgagctctccggcctcgggccagggaaggggaaggagacagtgcctggagtcccgcgtcagctcctcgcgcgcacgccggcttcaccagcacgcgcgatggaggagggaggcgaggacggcggtagcaaagcggcaagggcacggtggtggcgagggaatgaacgagagggagatggggcggctcggtttaatagatggcaatgtcggtttagggaggaagaaccgacattggcggtcaaggaggaggagctgcggtgagctggtgcagtcgcacgaccagcgtccgcgctttggccgcgagctgctgggaccatggatgacatcggcggtggtcgggaaaaaggggaaaggaagagggaaatgagggcttgacccttgccgaaacgggaaaaggaggagggagaggggagtgagacaggggctgcctctctcggccttggaagctagcggcgtggagcggcggagcggcagcgcggcagggcacgacgcaggcggcgccagggtttgacgcagcggcgaccggggcgttggccacgcgcgaacccgcgcgggaagggcgaaggcggtggtagcggcgtccttgctggtcggccatgcgcgagcgcgcgggaaatggtgatgcggccggaattttggggcggcgtcggcgggaagcgacgccgagagagagagagagagaaaggagacggcgctgtctctcgctcccgaacacgtgcgacgcacacgcgagagagctgggccgagaggaggggatgggccgggagatagaggaatcagcccatcgacaagggaggcaaaatagacttttgctgaaagattttgatttggagagatttggagtttgggttttgaatctaaatttgatactttgtacacaagggttcaaggagtcaaggaaggaaacaaaacgggagtttggatattttgggattcggaaatgtatttggcgaggattcaaaggaagggattgactttcggaattagatttcggagacttgaattggaagaggaaatttgaggcggaggattttgatttcgatgagagggaacaatgggatttgaaaccgagatccatggcacgacttagactcgcactcaaaggacaaaatttttcacaattaggatttgccgaattagtttttaacgtctcacgagaagcggagcgttacaacaacggtggtggctcccgagccctcccgcccgccgctcaccgctcatccttgctcgactaatcacttgccgaagagaagagaagagaagagaaaagaagaaaagttgagggagagagttgatggaggttgacagtaaacttgacggcagtggcatgggtctgatttttctaaattcctgtggcacgtaaccaatatcgtgaatagtagcgatatttttctaatatgggaaatttgcattggcatggatccaattaaccctatattaatagaagagggtttatacataaccaaaagttaaagaaaagaagaaagaattgtactcgcttgattgcaaacatccttgcatgtcaatcctcctcgcttcccatggcaacaactcaatatgttgtgcggtgggcaaactccaacagcccagctcctgaatgcagttaactattttggtggactgttgcttgttgttctctgaaaatgtttgcatttatttctttccaaatttcccaagcgataagcaagaaaactgatttgagagctttgtgttttcttgtttctgggttatttgttctttgtatccaccaatcaacaagtctttactcgtattccacctcaagatgatgtgtgcttgcagtagccacatgagcccaccgaaccgaatttacgctgatactgagcattcgaacagtaagtggtcaatggttttaaggtttcggaagcatagttagctgaagtagttattatgccaccccttgagttgcaaacgggtgtccataccctattttgtagtgcgagccgactgaagatcttgcatttggctaggggccatgcctcccaagacagttttgtttatggtgagatttcattccgttgaattggtgaactttgcactatatattttccattagttatccatttccaaacgatcagatcctccactcctttagtcaaatatttttttttgggttgggggggaggagggcggggaatactttgggcagcaatatatcagctcatttcgatctgatgtgaagcaaattgtgttgaacaagaataactaaacctacatcatttggcactatgtactgctggcactgatagtatgctcttgtcagttccaagacaatactgatcagttgggtgtctgtttatttgctctacttcctcctgtacagattcatgttattaggataatttatgttattaggatatatcgtatcccatattaaatttatttatcttgaaacgaaaatagaatggctcagccggcagcctcacctagattagcaacgtactcctccctaaagtctaaagagtagttaacaccatgtgtttaatcaattactccatccgatttcaaataactgctattattgtaattttagcttgaccatcaataaaaattttgaatgatcagatcataatgtatgaaagcttgacaattatatttagggtgcaacactttatcgatataggatactcttaggtatttatacattttcttcgaataagagtcaatttgaaaatgaatactacatccatcgttaaatacattgaactaaaccgacgtcattaaaaaacagagagagtattatccaatgacaagtaattgaatacagagggagtatcttggtaataatccctttggtttaattatttacgtggtgaaaatataaagacttgcccgttaaacaccatgcatcccgaacagcttaagcaccccgtacgtgaccgccatggcgagccaccctcccacgagcatccggacgccggagcgcgcgacgcccgcgccgccgaggtacgcgctcgccacgccgaagccggcgaggccgaggctgctcgccgcgcacacggccgcgaccctggccgcccacggccgaacgaacccgccggccagcagcggcagcgcggcgcccgccgcgaacgacagcgccgaggcgaccgccgccatcgttgggctcggcagctcctcctcctcctcgccgccgtcggcgtccttgccgccgcgcgcgcgctcgatctgggccgcctggatgtcgcactgcgcgtacacggacacgaactcgccgatggccatgctgcacgcgccggccacgaggccggcgaggcccgacacgagcatcgccctcctggtgccgttggcggcgccgacgccgaccatgagggacgccacggagacgaggccgtcgttggcgccgagcaccgcggcgcggagccactgggcgcgggccacgtagttcacgccgccgccgtcgcccggccggcgcccaccagccgccgcctcgacgtcgtcgacgacgacgggggccgccgtgggatccgccgtctcctcctgtttcgtctctggcgatgcacagccgacgtgacaaccaaggtcgatagccatggttgcaaagagtagtgcaagatcaacgacaagctgagctaagctagcttattacaaatggagattgaactgggaatattggagcttgcatggagtcatggagaggtatttatagcgaaatcgcgatctttttgttgtaccatgggaaaaagttggcacatttcagaacgcagtaacaaaatgtacctataatacggagtaaatgaacgtatacatggatgtgatcgtgagcgttgaaacgtttggtgttgatcgagatttgtggtgtaaacgacactccttggatcgatcgggcgaggattaagaatgcgcacattttgcacagagagtttctattccaatcagcgacgtcttgcatggtccagaggcatggcgcattggcgcgacgtttgtaatgcgagcattttttttttagtttagttgtgggcgagggcgtggctttgtgccttccatgagggcgagaataaagctagctactccggtgtccgagcacggcttcgctcgggaacacatgtgttggatcgtcctgcgctcgccggtgcagtgggcggccaccgatcctgtgtttttcaccggtgcagtcgacgtgccgagctctttcttccggccggtgactttccagatattaatactgcaatatttggctcccgtgtctgtgtggcccgaaggaaaacgttgtactactgtatctgatatctcacttttaaagaggtacggtataaacaaatgtgctcgcatacacgcagtcacacttgcatcaattagattgatgtatcttttgatattgacaaactcagtacggccgcttgttgtttatggtacagtattttatcataaaaaataattaaccgtaaatattattttctcatcagtttgtgcgttaaggctttcggctgcaccatctaatgcatggagtataaagtctagtgtactaccaactttggaggccaacccggagcgatgtcattagtgatccatgcaaatgaaggcgtatacaatactggcacgcatttccaacttatgcaccgtctcacctgatgttccctcgatttagactgctaatcgactgataaacaaggaaatgactcgttctggagtgcgtccatcaggttgcgcgccatccgtggcttgcatcaatgacttcggtgctccgatttgcttgttggcgttttgtcccaagtctgtatcggtattaactctaaccgtgggagttgttgcagtttgcccctttgagtgatttggactcgctgattcaagggatgtgccaaacggtcggaaatagtcggaaacggtatattattttattattttcttcgaaaacaaacggaaacggtcggaaaatttttatatttacaaattcatctatttagagccaacttcaatgtcacgctgacagaaattaaaaaaactaaattttgaaaacggtaacatcggtaaaaaaatattattattatattagttttgcggaaacggtatcggtacggtcgggaaattttcataccgttttcatccctagatgtgctccagtgcagtgctctcactgaaagtgaaaatgtgagatgcttctcatcgcgcaatcttttcaggaatgatgctttagctgaaggaaaatggtacatgttcaaaataattcttacaaaaactgaaactgatgcgacatattgtgagtaacatcttacttttccgtaaccaccaactgattggatacaacaagtagcgtatccagcagaatggagcgagttgtgtctcactcaaagatgcatgctgtttgttcacagagacgtctcccttaagaaaggtcggcgtcacgagagggaaacgggaagaataaatcggatccactgcccaagtaggaagtgctaaaaagctcgccgggatgacaaattccagaacaataggatggcacgggatacgaacatagaacaagctgagagcagaaaattcaaccttacaaaaaaattcgagaaagttcatgtcacatatccattcaagcacacttcacgcatcagaagaacaaagaaaataggacggtatttacaagtgcagaaaaaaaaaagagctcaagacttaaaaaatttgtaacaataaacaaacagtttggtatattaagagcagtaaggtaagagctaaaatagaataaataaacaggtttagtatgattacataatcccacacgtacgcacacggtgatcatcatatacttccagcaggatgcatgtatccggttggttttgcttgcatacaaaacactatgaacaaaggtggatcatgatcctgcttgagtttaagaatgaacgacttgtatatcctcatttcataacaagcgccggttgacagttatacacatggagatgcccgcggtaagaacatctcttaccacacaacctccttaaatggttgggatacttcaccagctatgttaagaatggcgcaaggatttatccaatgactcttgcatccttgatctactacgggcaagcaggttctcctttatttctttaaaagattcaagctcctcgagcgcatcagatgtcctacgggacatgaaagaactgacattacctccttcaacagattcaacccttgatgtaagaggtgaattgctagagtctcgcagcggccgcgcagacttcagcatgtggacaagataacccacagcagcatcctgtgatttatgggatgatgagctcgcttgatcccccacatcctttccaccactgctcctgtaaaataaatacagtggaagtttgaaataaacatatctttttgctaattgactatctctaattaataaagtgaaaaaggttactgatcaaaaacattgtatatgacatatgcaggatagtaaacaatgcttaactacatattggaattggatacagaggtcgggaaattggattgggatgtgcaaaacagtggaagctggtatatggtgaaatataacgaggatggagcccttccgttgctaatgtgctaaggaggaggcgggcttatgggctgagcgactaccaagaaaggatagaatggtgatctcgctttggaaaaattgttttcttcccctctcaacactctaactaaattgtaaactccatgtactaccctaacccctttcaatgaaatgaatacaggtggggaagtcttccctctggtgatttgatcaaaaaaataaataataaggatggaagagttcaaacataccctggtcgggaatcaggtgtatcaacatcatccaccgcaaaaggaaaatctaaatcatcagtatcatcctgcattgacaatctgcttgaacttcttgaaaacccaagccgtggggaaccactagaggaaaaaacacctgagaatctgccagattcatccctactatccttaatcttaatctgcatatcggccaaaaagatgcatgcttagtgagcatagactgcacttgatcattggggggcacaaaatcttacttttgtggaattcattatggtgttacagaaggaatgcaataggcaaaaaggaatttggaatggaattacataaaacccagaactagagctagtaccaaagcaggaactgctgtttttcaatcaactagatggatctcatcatcaaatacattataacatgagtacagaaataatcacacaatcagctcatttaacactagacatattagtccttgaatagctacgataggcatgttttgtacaagtatcatgttgaggaaaacaaatctgtcagttagtctaatgagactaaaagctactactaactgtagtgttagtttaacacagctcatataggattgccaaagctcaaaagaaatcagttttcacttagccatgagcttactagctcatttttgcatcgtataatttctcgaaaaccaaatgcacatcacaagtttaagacctgtcatcttttggcagtgattcatatactatagtataaatattgttgtaaatgttcgtacaacaccataacactcccaaatttgtggataggatcaacttcgccgatgatcatatccataataattcacatctgccaaatatgcataatcatgtatactaatttgtggacaggatcaacttctctgatgaaaattgtcagccatcctactgaaagaaatagttttaatagttgcataaacagttctattcgtctgtaaaagacatccacgtcatattccgcaattgtgctatatatgatcctaaaatggatatgatgtaacatcaacgaagtcctcatgaaaacaattgagccctatcctctatcctctatcctctatatgggatgataatcatccgatcagaccaaaggtagtaaaaaggatgtgcaacataccaacaaccaacgtaatgataaagacctatagccctcagaccatgcaaattatattctaccaaatgccacacggagagtgaaatatactgaataaagatattagttataatcataaaaaatgaataagccgcaggtttagccgccaacaaaatagttgagctctaaggctctaaggtgttgctcttaaacacagaatcatgatgaatgagcaaaatgcattacattgtactctagcgattttcaaaacaattccataaagatgagactttttatagtttgtgctttcaagtttcaactatgcacacacagacattattcaacaaatgtactaaagtcaggaatcaccttaggaacagaaggcaaattagtgtagagatcagccatccggatccctgtccggcctgtctccatcggtgtctcatgccccccagagtcgcctctgatgttcttcggtgaaggtggaggtagcatgaaccccctgacgggatccgacatgttccgattgtgaacggggcctctcccaccacccggtatgatcatcggcgcagtctccccgctcagccgcgattgcaggtagccacccgcaaacgtgggaggagacggcgtgggagacgcgtacaatgccggtggcggcgagaatttcgcctgctgcccgggcgtatacggccagggagcaggtgacggcgcccagctgttcgggcgccgcggcgggaaggccggcgctgagctggcggcctccgtgagcgacgccgggaaggcacgcatgggatcagctgccgggcttccgacgtaatcggtgatgagcatggcgggcgcgagggagcagatctcgaggttgaaggcggcgagggaggggaggtactgaacggagacgacgaggcgaccgagctgggtctcgacgggggcgaagcggcgggtgctcatggccgcctcctcggcgcgggtgaagggcgcggcgaaggaaccgacgcggaagcccatctcgtagttgtacgcctggccggatgcgcacagcaggcggaagacgcggtaggcggggaggaggcggagcgcggtgtacaccgacctcagcagcgtgatgcaccgcttgtacgcccggttcacggcgagcccctccccggaggcggcggcgccgccgccgcccctcgccccggccgaccacggctcgcacgacaccgtccacctctccaccaccgcctcagctcccccaccgccgcccgacggggtcaggtagacatccaccacgagcggctccccgggggacggctccggcagatgctcggccgacgccggcggcggcggcgcgtggagcggcaggtggaaccacctgtcccgcctccggaacgacgccgccggcgcgggcgcggccgcgagcggccgcggcgcgcgcacggcgaggatggcgtgcagcgccttgaggtggaactgcggcaccatcagctcggcgcccgcccggccaccgccgccaccgcccgcggagtccgacagggtcgccattgccgcacacgacaccaaccaccccccgcgccagtcaaaccctcctccaggatgctgctgctgctacaactcccctgctgcatggcgggagcgcgcggcagtgagaccgcatgaatcccgcgcgcccggagcgatcggattggagagaagacggatctgcgcgcgcgcacgcgtcgggaattcagtttggcttttgctcgcgaagcccggatgaggcgcggaggtttcgtgtgtaggcagcagcgaggaattggggatttttgtgcctgcttttgaatccggctaacgtgtcgctgttagtgtcgtcgcccgtcacggtagaaattatgatttgctattttgcattgcgagcttgcaattaaaagccgtgagattctccttttcctcgtataatactaagactattttttatgtcaccaaaattacataacattatcagaaaaatagttactccattcgagttgataatatttgtcgttttagacaagagcacgatctctaaaaaaaacaatttgaccttttttttcattataatatatataaaagtgttaacaaatatatgattttattaaagtatttttaagactaatttatacatgtagtcatcacatttgattgacaaatattttaaaagtgattcataattaaatattctaaagtttgacctcacacttgttaaacgataagtattatcagcccgaaaaaaatagtatttatttagcacatctctaaactcaccaaaatcctattgaaaccccagctacgtgtccataatacccatggacactaggatataaaccatatgagtagagtcatggatgactccaccccacatcaccagtattttccatttatttagtttcttgattatgcaagcataattcttgtcaaattcaaaataggaagttcatgtgttgctaagtcttctctaaaaaaccggatcaatactaatattgatctattctttaaaaaaaggtaatattgatcttgaatttgaagcttcgtttactggaagagataaagatgcgacgttggcatcaccatgtcctgcaacggagcacgttcgtggtatgcgcgttaggggcttgcttgatggaatggagaagaggaagcttcaaagggatggatgaatattttccattgattcccgggggttatcttacatatcctacaattgctttggcgtgtgaagaatcacaagacactattgttggtctcttaaaacggagtactgccgcctacttgcgtgctttgaagttttagacaccggatatatataaatgcctctaattcataaatttgacacggatgtgagaatatggtacttctatgtgattgggattgttgttatagtttattgtttggcgtcaaatgagtatgggtacaataatcaactttgttggttgtttttctgttttgactttctgagagtatatttgtagcatagctagctgtgtgccaaatataaaagtggtggtgttgagttcatgtacctgacgggttctttttgcaagtagaaaacaaatagatgttcatggaaagcacctagagagtccagtagaccagtactgccaaaacaatatttttacagagcagtttaaagagggttttgcactgggaaaattggaaaccaaatataagaaaagagttcaaatataatagctttatttctgaacacacttgagttggccaaaagcaacagaaggacaacacatataggcttggagatcaaagttgcatcttaaagatcgtatcaatatccaaaacgacgtgtttttttaacttgagtgagtggattgtcaatattgacagttgacagatgcctaatccaaattcctttgttagggatagcagtagtggtagtagtacacgactacacgggtgtagagttggacggcggtgtgacaaacgtttcaggctcttaagccccttcctcatcctctgacgacgtgttgaatcgtttatttagttgcgtgaccatcgcaacatgcagagcacggctgaaactttgtgctgaggctctcgagtttctcaggaaagcaaagaatgagtaatattgtaatgaaagaacatcttcagtcttttgttttttttttctcagcaagcttttccactgctgcgcttatgttccacgttggtcgtgtttttttctttttattcaccgaattaatcaaactgattatgtgctccatacttaacaaattacgctttcttttaaagaaaaatttcttctaccgcattaaccacttgttttaagttatttattaaatattcaatttatctcttaatcagatagataattcgcgatcaacaataatctaaatcaaacatgaccaaacatagttacatgttttaccggttcaacaagacaacaactcaaaacaaagggtgtggtctccctttttttataggcccacgctccttccaacctgcactggcttatgagtccaccatgggtcacacaacaagtcacaactcacacggctcagtcgagaggaggaattagctttaagctggtccatgggcccaattgggcctgaagcacacttggcattaaacacgatagtcatatagggaataagttcgctttatatccctcaatttgtcgccgagtcttaagttcatccctaaaccgaaataccagatataacatgtcctttaactccttaaaacagtgcaaacttgatcccaagatggtttggatgacgtgacgtttatatggttgatttgactgggtcctcatcccacgtggtgaggcacttgcaatcataaaaaatgggtgggacccacatgatagtgttagattaaaaataaagaattattgtgagacccacttcatcaccccttcctctacgctctctctctctccctcccctttgctctccctttcctcattgtccccgacaccagtgcacgttgcagctgctgccgaccctgccgacgggtgtgggatgctcgctccccaccattggttgcctcatcctctcctacgcacttatgagggaagaaggctggaatccattgggcaatgttgaactcgagcttctcccacggctaggagtgaacctcgtcgatagtgtgggcccagatgccaagacgggcgatgctcggctgctgcccttctccacacctcccgccgtgcctttccacgccgcccgctgcgcgccgccctaatggagatggaagggagaggacgatagatggagaggaaaggaagtaatcgaacaacacaggcggagaatgaactcctacacaatggcgcgaaagttggaggtgttggtgatgagcacggtgttgggcggctggtaggatgctctcagacgcttcaaaaaagaaattggaaaaaattcttgtaagtactacttatacaaattttgtgataaaaaagagagaaggttaacataatagactcttatcgtttgtgctagttgcattaacacagccgtaatagttgtacctgcacagttgtagttcttttttttttcattgtggatgttgttcctgtaactgttactaggggtggcaatttttccgttagggccagggccgggggagaattttcacctgcggatgagcgagggtggggatcggaattaacccacgggtaacccgaaggggcatcggatgtgagttacttcctccgtttcataatgaaagtcattctagtatttttcacatttatattgatgttaatgaatttatatatatatatgtgtgtgtgtgtatgtatgtatgcatgtctgtctgtctgtttagatttattaacatcaatatgaatgtgagaaatgctaaaatgacttacattgtgaaacggaaggagtacctctctgaaagtagcccattgcaataatataggcccattaaactcattccaaattgacatataaaagctcaagacgctagtttccctcgacccttatctctttccttacttcaaccaacccccttcttaccgtctactatttcgttgcatcaattcatctccacatcgcctcgtcgtcgattcatctccacatcgactcgtcgtcgccgagtcaccaagcagccagccgctgtccaatttgcctcgtgctaatcattgtctattatgcatcatttcaattagaagatagaccatatgatgtatcaagtatgtatatgtgcttgatcatttcaattagaagatagaccatattatgcatcatttcaattagaagatagaccatatgatgtatgcatatgaccttgatcatgtgctttatgtatttgtgtactgaccgatgagtatacattgctattgaaattttgaaattttatcatattattattaggtgcattgtcctatttttatggagtattatctttatccgggtgatgcggggcccaagtcacccgtgcgggtcacctacggggacgggtgatgttttccacctgattgccttcgcgtgaccggggctgaggatacctacaggaggatgggggcgggggcattccagcccaacccgaccctgccccgccctgttgccacccctaagtgtaatgcagcggcaagtagcacaactaaacaaccccatattctcaagccaaactaataatggattaaaaatgaccaaaagaaaagagaatagtgaagattctttattgctggaatgtaaaaagtatagcaaaattcatgtcaaattttcttacattacatcaatacgtagttctatatgttcgaaatgcctccaacatactccctcaattccaaattgatctacatatttcataggtacaccaagaccaagaaaagctaataactctctcatattatatttactctagcaacaaactcaatgcatgcaccatccctactattttctagccaatagcaaatcaagatattgcatgtgggttataaatgcttgtgtgcatggatgcatgcatcaatgtccatttactccaatgcacaaataacaaatagacctaatgaatgaacacaaatatgtatatcatttagaaataacctaaaaaaactatatgtagatcaatttgaaatggagggagtattcttgtagttatcctaaatttcctcttgattttctactgcgttttcccttttttttccccttccaaacagttcacaataaccgcagcttaccatgtggttaccgtctgaaatcgcgagtaactatctcaaaactatggaaccactgtcagatcaaaataatttgtttaaaattttgacgaattttatacggtttttcacagctaccgagcaacacccataatatcgtgaaggtcgataacccccgctgaaatagtatggaaaaacgatggattagacatccggctgaggtactattgcctcaaaacctcaaaatgtggatgccgtaaagattaattctccgggtttcataattcttgatattttgaacaatgaaacggcctttaaaacatatttttaactatatttttctatttataatatatacaataaataaacatttttttatttttattatagtactttgtgaaataaatctatatatgttattctagtgattataaacaaaataaattttaaagccattgatagttataaaagtttgttctcatgttcatcaagaattatcaaaccaaagagagtaaaacctactccagcttgtaaaaatacactccagtcacatgcggcattctcttcggcatttctagtaagcacagttatatcaagcggatctacaagcaaaatacgagaaactagcacacgttatacaacacaacaccgattggctctgcggcgatataatgtcagcagcaatcaaagaccggcggcggctgggcagaaacatgcacgaggccggcaacacaaagggcgcaaacggacgccaccatcaattttgtgcttcctaaaatcctatggacaatcagaacatgcagatacaccaagatcgaaaaggggaaaaaataaaaggagaaaaaacaaaagatcctttggtcagtcgcatcgtcgtgtcagccttgtttcgtgtgtggtcgatccaaatcaggcgaacgaagggatcccgtatctccagccgttggaggatcgccgccgggtcggctgctgctgcggcgcgaagctgagcccgaacatctccttgagaacttggcctggctcctggagcccgatcagcttggcgaccagggacgcgctctccctgacatgctccaggtctttcgtctcggtccagaggcggcgagcgacctgcagtttcctcctcttggagtccagcgagacaccccattttgtgtacgtgtgctccctctcctccgtggacagccgcttctgcatctgcctggcaagcatctccctctcccgctgcagcttctttgcgctgcattacagcagagcacggggcttatgagttgctcgtgatggtttggcgctaattttaaggttatggcacaaaagaagtgaatgaatggaaacgagtaatttacgcacctcgcaacaggggaagtactcaggctgcctactatcgcattgctaggggtgctcccccttgagtatgtatctctcaggaatgatagccttcgaagctccacttccatgtagatcgagtcagctgcttctcccttgaatagcaagaaaaagtaagtcctgtggaccaaggaaatgctgcaagcttgccaaagctcgatgatctcttgctgcttcttctcgaattccaaaggccatcgagaaggtgactgagaaacaccctcgatcgggtccaatccgatgctctttccatttgcattctaaaacatggatgaaatgccaataatttaattacttgctgaagcatagaaaaagaagtattcagcagaaaacactatttattttagattattagttggaatgctaatggtatgtggcttttgaggggtgggagaaattgttgaaattctatgatagagtcccaagagccaggatgttaaaccgaagcaatactatatataagcatgtattttccaaaccagcatcacataatcacatttttcttgaataaaacaataattaaatgaactgcagagctaagtgccctcaaagctaattagatattttcatacctggtcacctaactgcttctgataatgaacctgggccatctctttgagttcagcaacaaattcaccaataccagtgaattctgtatcgcatgcaacagacccatttgtctttgcatccttaaaagtgctgatctcagaactcatggatcctgcccttgaaagtgtgtcggtctctgcatcatagtgcagtgcagatcctcttctatgagattccacaggtcttcctgggaactccaccaaacttctatttagtggagtgcaatcatccatctccatatcgtcaaacatagtagaacctgtcagtgatctacagctcctgcttctaccaattactcttaagtttgatgagttacgtgttgaagatcctagatctttggctagactgacaaaaggccttctaatattctccaagtgttcctccaaagtaataggagcttcgccagagggccttgaatgcctagaattcactgatgcatttgaatcatttccatgcaaaccagaattcatatttgaatcttgtgggctactactttcaccagctgataagtccaactggtcatttcctcctgtccgattgctttcaatacatcgcacttccttgtaaagatctgaatcatcatgagagacctgagaactatcatctctgctgacgcttgggggcattccaacagatggagggcttctgactgaatgctttccttgaacctaaaatataaacaaaacaaacatgaccctgccggaacaacgagatgaaacaaaactaaatttcagaagtcatggcagagaatatacttgacggttcaggtcatgatcaccgacagattgcagcaaatcctgcaacctggattgagccaaatcacgttgtgacttcagttcttttatttctttctccatctgcaatggacatgacatgaaattttatggatgtgtgcaacagaaacaacaaactttttttgtcaagtagaatagtgtggaaatactcgtaatggacaaggcaaaagtggcagcaagtaagatagaccagatgcacacaaaaacaatagttttctgcaaattccagtatgagccgtggaggagaaaacagggaggtaagaaaagtgacaagtaactttacctttctgatttggttgtccttttccttcaataatgtttcgagactggaactctgaactggatgccgcaactcgctctccaatctagcaagttccttttgcaagtgcttaaccagtgctttatcagacatgaccacattaacctgagcatttgtaactacttcctttgcacaactcccaaatagcagagtatttcttgattgctcaatgtggctagtggcagggctcagtgtacaaataattgcagttcttgcattacctcccaaagatggctgtagtatgcgtgtaagctttgaatctctatacggtatgtgtgcattacttcccatgctgcattaatgaaaagatataactgatatcacttgggcgaaattccaagcaaacattactgtaaacatcccactttattgtacactatataaaatcccaaaagaaaatacatatgcataaagcatgcttaaatatgtcagcacacaaaaaattgtgcaaaacatgacatgtactacacaaaataaaatgatatatattatctgttatcaaacaaatgcaaccctattgcctttttatgttttacatatctaacaatatttttgcacaaattctgtgcacataatacatgctccaaatatatatctttcctagaattctctaaagcgacaagtgtgaaatcaaaacatatatggagctacatgactacagccatccttaaaaaatcatactctgtcaagcaacaaactattctctaaataagacaaccaaattttcctataatgtggattgaactaaataaaattgcacagtttcaagttgagattcggacctcagttttctaatgacagtgccaagggcaagcaaactcctattaatgtgacaaccttctttcagtcttgtgccagctgacaatgcctgagatgcacgctcacttccagccagatcaacaaagttctgcatggggagaaatggagaatgaataatgcatgcacctaatttttccaataaaaagaactccatgatagacttgtaagatgttattcttactgcactagccacaagtgtagttgacttgtcctttcctaagaactcgcgagcagagctttcaactgtctgaattgcttgacaaatacatcagccaaaatgaagcatagactcaaagataacaatttataccaaagtactacctccgtcccaaaataagcgcagccatgagtttctgcgcccaattttgatcgtccgtcttatttgaaatttttttataattagcatttttattgttatgagatgataaaacataaatagtactttactcgtgacttctgtttttaattttttttaaaaaagttttcaaataagaggcacagaaaaccatggctgcacttattttgggacggagggagtaattcatagatttgagtaaagaacaaaccaatcgaagtatctgatgggatctagaacttttttcgtttaagaaggtctccccaaaatttgcttgaggaggtatagaatattctcgtctgcgccagcagcttataatcgaagtatgacacaaactttttttttgtattgctctcatgtaattcaggatttttgatcacttgatatatatatatctaaatttattcccctgttaccaatttttctctccatggcaacgagatctgattggaataattcaatttttcttcacgaggtcttttacctttgcactgtttactagcctgccagaccactcctgtttggtttggtggtgaagtggtgaacaccttttctcaaaaagccaaaaaagttcttttaagcttgacactttattagttgctgaactaggtaggttgttactgtactgtagtagccattattttttcctgttcatatgctaacattttgttgatgttagtatttctgatggaaactggcatttgtgttataacaggagctgggagtactgcagttctcgtcttatactaggctactagcactcctctgatctgatggccaacattaacatggcagatactgctccttcctgtgatacttacctgttgaattattgttaatatcttggtaatcctcttagagacttagaccagaggagaaaagaggaatctggaggtcaccgccaggaaaacgctacggacaacatgggcggcagatggggtgggagctacccagatctgcgccgacggtggcggccgaagaagaagaggagaagacgacggttggggagagagccatcctccattcgcgcgatggcggtggccaggtaggatcatggattcagatttttatgccatcgatttcctggtttgctcttcgtttactaatcatatgaattaatatgcatgtaaaatgactctgcctgctccaccatgattatgatgaataagagcaataccggcttcggccaataggagttttctctacatcagtccctaggaagatgcgattgtaggcgtttagttctcggtagccacaatactagacaggacacgctgatatgaatcatatctgaaagatctcaaaaataaaggatcctttgaggacgcgtcccggaggctccgggtgctccacaccgtggagaccgccggggtgttcgacatggtggcgcggtggcgcctcttctcatgcaggccgatgcccacggccgcctcgtgctctggtgcctggagcaggaggacgggtcggacaaaggtgttgtttttcttcttgcatttgccttagcgtaggaacaaaaaggttgtttattgtgccaaaatcgaatcactacctacttgctaagcttccatgaaatacgcagcaatgttcataaatttttgactgaacgtagtgatgtagaaggcaaatgttaagttcttatgcttctgaaagtgttctatcatccatgtgaatgttgcacgatatggtaccgtctcaatcctttttcgagtagtacactgctatgtacttgccgtaaaaattatttccataatctcttatcgattttcttatcgtatatggagctttattgtacatatgaaggtatagcgtattcgtatattccatgactcgtacaccaccttacaatggaagctattgtaaagtggttttagaaacgataatactaatttctcaggcgtggagaccgctggagtgtttattttttcaaaataactttttttagataataatcacacaaaataactaaatgtatttaacttatttcctgtaagtactggtaattttgccacctactgtgcttaaaccaagcctggatacacctttttttttttttgctttggatacacttaaatgacgttcaccaaagatcgtcaccacctgcggacgggatctagacatgagaagttccggctatagctctatgttaaggattgtgggaaggagctttttactctaaaagttctgcttcaatcttttgctcaaggtactagattaaaggctaactatcaaaaatcatgtttaatccctaaaaacttgagtgatggaaaagatgagatgcttgctagggtttttgtctcggaaagaaacctagagggaaccacttaaccgatggaacactgatgctaatttcccgacatttttcaaattaaggagtatagtttttcaaatctgggcataattcacgatatgctgatgtattgtgaatcaggcgagtatagtttttcaaatcttaaacgccgtggtctcttgggaattagacagtctccatatcagaaaccaagcagagttctcaatctattcaggtcctatcaaagctatattaaacgaagatcaatttttataggactagagaaatttgctatgcaaatgccggtcactggccttatccatactaagtgctctagtaactaataactatggcgtggtgtctaggttagagattatctttgtttgttgtgtatcccacggatttgtcagaggtaggcggcaggtggtgaaacttgagaatatgttgggaggagtaaaacgtacgtacatactatatacgcacgtacggctggaggggtgggaggatagttgatttcttttgatagatttaattagttttgtgttatctataacagatctaatggcataaataatgggcccactgatttaagtgaaaatcaatggtgggttatttttagaaatttttaatattttttaatttactaaaataccacatgccacatggcggcttgagagcgtttataggatgtctatgtggtggcttgagagtgtttgtaagaagtttcacggacttgatgctgcaaccttcaatatacctttctagattttaatataatactagtccatctcttaacactagtccacactattaatattatttaaacttttaaatatttttataaattataatatatttcatataaaataaactaattatatatgatgttatttgtataccttctgatatgattcatatcagcagggagattgctctaaaatattctagcataattctcaagccatatcatagtcgagtggagctaagataacaagatagggaatactagacaccgtggagaccgccggggtaaactagacttcttaaacgaaaagggacatgaactagcgcgcgagaagagcaatacaggacatagtcgagtggcttataatgaagttaacggtcaactgacagtggactgatggcaatggcataaaagggaggagaaacttgaaccggtggcataaaaaggagaagccaatttgaagtggtatataagggagccgattaatttagagtggcatataagggattctctcttaatccaagcccttcatttattttccaatcccaatctcaaccctcatttctcattatccaaacacaccctaattgtgtcgtcatatttctagttagtactagatttcagtcagatttttgtgcattggatttgtgttaagacccgtgcttgaggttgaaaggccgttggatctgtgttgatgtaggccggtcggggctgatgttacgggacattatgaagttcaattggcaaaatttactacatgacactcaaaaaaacgtgtaattggctgtgagacaccgcaaaaaacgtgacacagctgatggacactagaaaaaatatgtatgagctataggaaactttcgtggtgctgagctgcatcctctgtccgggagaagctcgctgctgatttcaaccacatcctccaaaacttcgcctcagcaaacttcgtcgtgggaggaaattcaccaggtgacacctccagccagatttggcatgaccttggcagcatcaaccacctctgttgggataggagacggtgacgactgctaggaggatgtggggtggggggtgggaagcatggtgaaggcagaggtggtgcagcgggagaggatcttctgatgtcactgttcaccgtgcctgacatgtggacccaagacagccaccaaattagtggaagttacttatattgggattagcttttgattttaccctggttttcctatatatatgagttatattttggtatagtatagtatagtaagtatgattgtatgaaatggtttaatttcaggatagagaaggcttaagtttggagtttttttgagcgtgtgaaatgtgctttggtaaaggtagagtgctcatatgtcctttttgtcctctattcaatttttttttgtattttctttctctctgtatttaatttttgtggttaccattatatgtactagtatattagcctttttgctgctactctaataatttggtgatgagaaaatatgtggccaccaaattagtggaagttacgctaaaggagcttaatccggtgcagtagcggcgactggcatgcggtggtaaaagtggccacacgggcacatgggggcgtgctgatgcatgagctgctaatgttggaggctaggattaggatggaatagggtggggagtatatagctgatgggcttagttctgtttcctggacctgtgataggttactgggtcaaattttccaaactcagtgttcggtcagatcggataccgacaaagaagaccgaagcaccggaaaaagaagagggaatagaaaaggaaggagaagggttaatgcaaaatataagtacattgtgactatgtgatagataattatttatgtggatggatgagtagtcttgatggttccctagtttcttggtcctccagtacttttaccttctcattttaatttattactgcacaaaacatatcttcttcaattcgtcctcttaatccaaattggttgcgcatctctctcacacacacacacaatcggggtacatatacattgcttttttcttggatggaggagggccatctgttagatggatctccctccccttgagcccaacggctcaagggggccttgacccgcgccctgatcgggggcgcccagcccaatggctggtgggcccccgtcacactgtgccatataaagaggggtggaggacgggacggaaagaaggacacaaggaacgaggttcgtcgccgccgccgccactccaccccataaaccctaaccgatcgagggggcgcagccagtgacgggaagtccaccgccgcgccacgcctcgtcgttgacaccgtcgctgctgcaaccgcatcaccgtcgccgtcacgaccgccatcgccgccgccgcccacgtcaagcagagcgacgacaacgacgatggctgggacttcctcttcatccaacgcgtcaaccggtcacatccctaaaccctttcccttattctctatttttgttcaatcatccatcgcaaatagaaccacccgactagatctaaacctaggtgatccaatagacaacctaacaatggtatcagagccaccctagagtttagattggttggggaaagaaatgcaaaagaaaggcaaagaaaagcaaacgatccaacggatcgaaaagatcgaaaccctaaccctaatcttacctcgtcgccggccgtcgttgacgccggccacggagggggagaggggcaaagaggcaccgccgaggagccactcgacagccgcgtgcgcacccgcgggtgcacgcgcgcgccggcgagggggcccgcggcggcgccaccatctccgtcgtcgccggtctctcactcttcactcgcgtggaggggtgagacggtggggggggagaagagaaaagaatagagggcgtggcggcgcgagggcgtcggccatggcgcggcggcgcgaaggctgccggcgtcggcgacgccgctcggcacggcgcacgcccgcaagagaaaggagagggcgccgcggcacaaccgctcgacggcggcgcactcacccttgagtgagtgcgcgcatcggcgaaggggagtgcgacggcgccgccgtgtcgccatgccgccgccggcgctgtgctagggtttcggcgacggcgacgccgctccgtgcaaccgcaagagaaagaagagaagaggagctagggtttcggcgccggcgggcgggggcggttttgtttgcccgatccgcccgcgcgaccgtccgatcgaaaccctagcgatcggacggccgacggcggccggaccgaaatcggcccatgtgggagcgcacggcgagccactttcccggcccaggcccaggttgcggcctggggaaaggggagggggcgcccgcccgcgcgcaaggcggccgtgggccgactggcaaaggccgaaaaagttcattttaggtccctcggggccgaatcaaaagaaaggaagtttaataaaagtccctcggccgaaggaagcattttcaatatgttcaatgattgtgtttatttctaagcaatttgaaccaacgtgaaaattgtttagagaatagataaatgtgagaaatgcttctgaacatgtattttgtatttttcatgcaaattacaatagaattttgaattgttttacatgttttatctctgtttaaatttgaaccaacgggagaattttacagagcgtaaacaacagagttttgttacaatttatatgaattgtatatagatcttccgctgcaaatagatgaaattaatgaaaattagtgtttctaaaattaaatttcgaaccaacgggagattttaattttaggaacattaattatgtgctatgatgttgtaatttttctgaccaacgttgataattgcaatgttatagttatggctttatgtgttatgtctattttctgcccaacggtgatgtagacttaatacataataattttaatgttaattttgttctcacaatacatgattatcttaggtggctactccttgatgggttacattaaagatattccgaccctgaaaggagataactacgaagaatggaaaagagaactcgaccttgcttttatcttgggagaggtggactgggtgttgactaccccatgtcctatagaacctgctgaaattttcagaggtgaaaaagagtcagatgctgaatggcaaaagagagagagggacaatgcttccctcatcatgtcgtatgacattgaacatgcgaaatggtcttcagccaacaagaattgtttggctgcggtaaagaacacgattgagccaaccatattgggctcaatcccagagtatgacactgtctctaagtacctcgaaagtataaagagccagtttagtggttcttcaaagttttatgcgacacagctgataaagcagcttgttacagagaggtaccatggaggtggtgtaaaagaccacattcttaggatgagcaatatggcttccaaattgaagcaaaaagatttgggcatctcagatgactttctggtccatctggttttgtcctcattgctaaagaactttgacaaccttattgtcaactacaaaataagtacagagaattggaatattgaagagctcatctctaattgtgtgcaagaggaggaaagacacaaagagaccaatggtgactccattaaccttgtcaaagataacaaggaaaagagccacaggtcaccctcctcaaaagaaaaacagcctcagcatctgcctcagaagcaacagtttacagttgagacaagatcagtgtctacattgcaagaaaagacattccaagaaagatcatcctgacttcctgacagtgatcatggcaaagaaaggtgagaacattattacatttgtaaagaatctcattatgattggttattctagatccacatggtggattgattctggagcaactattcatgtgtgtaattgtttaaagggattccgttcaatgaggactatgcaaagaagtgaaagatccattagagttgccaatggagttgaagcaaaagttgaggctggagatcttcgcctagaactcgcgaatggcttcacacttttacttccagacgtttttatgttccttctttgcaaagaaacttgataataagtgtatccaaattggattttgatagatatgattgccattttggaaatggcaaatgtgaatgttgtgtcctcgttgacaaaagaaaagaaagcgaacttctgatgtctcatcgaaattatggcagtgttgtttatgccatatttcgagggggagaattgagagactggttaagaatgtagttcttcctccattggagttctcagttttagaacaatgcatacaatgcatagaatgcatcggtgcccaaaacaccgtatgagctatggatcctccgtgtgtgggggagtcctgcaaaggataaagtatttaacccaaaacagtaagctgccattttattggctattctaaaagatcaaagggtcatcgtttctactgtccaaacagttatacaaagtttgtagaaacgggacacgtcgtcttcttggaagacgaaatgattagggggagctcggtaattcgagaaattgatcttgaggagaggcgggtgtctgtacccgctccgtcgactcaggaacctttcttctctctacctgctaatgttgtgccagcaatgcatgccgttgcggtaccaacacctgttgttatctctcctgtggcaacaatgaatgaaagtgaggaacctgttctacaggattcaacagaaattattgccacatcagaggaggagatgaaacagcctcaaacagataatgtgccagaataggaggcccctagaaggcctgaaagagtcgcatatggaggatgatcccatctcatatgaagaggccatgagaagccatgaaagatgaaatgaaatcaatgaaattaaatgatgtctgggatttagaagaaattcctaaaggagccaaaacagtaggctataaatgggtctacaaaatcaaatatgactccagagggaatatagaaaagtttaaagtgcgacttgtggcaacagttttcacgcaaagaaaagagattacaatgagacattttctccagtctcttgtaaagattccttcatgattataatggcactagtggcacattatgatttggaattacatcagatggatgtaaaaacggaatttctaaatggtgatttgaagaaaaaaaagtatacatggcacaaccgaaaggtttcgtcatgaaatgaaacgaaaatatgggatgccgtataaagagatccatttatgggttaaagcaaagcttcgagacaatgctacttgaagtttgatggaacaataaagcaatttgggttttcaagagaatgtagaggacaactgtattgattcaaagttaagaatgggagactcattttcctaattctgtatgtagatgacgttctactggctagtagtgatgtcaatctactgcaggaaataaagaaattcttgtcctcaaactttgacatgaaagacctcggtgaggcttcatatgttttgggcatagagattcaccgaaatagaacaaagtatgcattgggattttctcaaaaggcatatatatagaaaaggtgttgaagaaattcaatatgtacagatgcagtgctacacctgctcctatagtcaaaggcgaaaagtatggggcatcgcaatgtcccagaaatcagtatgagctcaataaaatgaaaacaaagccatatgcgtcagctgtaggaagcctacagtacgcgcaagtgtgcacacgacctgacttggcatttgttaccgggttatttggcagatttcaatgtaatccaggcccagtgcactggaaattggtaaagaaagtcttgcgtgtttgcaaggaacaaaaggcctcatgatgtcttacagaaaagcagaatcgctccagatagtggggtattcggattctgactttgcaaaagataatacaaagttaacatcgggatacatgtttaccctggcagcaggagctatttcatggaaaagctcaaaacagactaccactgcagggtctaccatgtatgccgagtttatagcatgccatgaggctacggggcaggtgaactggctaatgaagttcatacccggttttaaaggtggttgatagtattgagaaaccactaaagttatactgcgataaagaatccacagtaatgtactctcacaacaattagtcaagtggtgctgccaaacacattgacataaagtactatgttgtgaaagacaaagtccgggatcaaacaatcagtctcgagcacataagaacagaaaggatgctcgcggatccgctcatgaaaggcctacctcccaacatgttcaaggaacatgtagcatgcatgggttttaagggaagccttatgaatcctggactatagggcccaaaagttaaagtatctgtttctgaatagagatgtgtatagtggctgtcgaatccatcggtaattaaccgtgacgatgaaacatgctctatatgtaaatctgtgatggaatagaaaaagctaaaggaaatagtgagatcaagggggagaatgttagatggatctccctccccttgagcccaacggctcaagggggccttgacccgcgccctgatcgggggcgcccagcccaatggctggtgggcccccgtcacactgtgccatataaagaggggtggaggacgggacggaaagaaggacacaaggaacgaggttcgtcgccgccgccgccactccaccccataaaccctaaccgatcgagggggcgcagccagtgacgggaagtccaccgccgcgccacgcctcgtcgttgacaccgtcgctgctgcaaccgcatcaccgtcgccgtcacgaccgccatcgccgccgccgcccacgtcaagcagagcgacgacaacgacgatggctgggacttcctcttcatccaacgcgtcaaccggtcacatccctaaaccctttcccttattctctatttttgttcaatcatccatcgcaaatagaaccacccgactagatctaaacctaggtgatccaatagacaacctaacaccatccagctatgcaggtgaacttatgcgagggtctgcaccatatgctcggcagattaaaggttaaattaatcatatgggatgaaacaccgtgctcatatgatgagcaatgctcaaattcatttgatctcatgaatcatatcagcaggttgtttctgatatggagactgtctaattcccaagagaccacggcggcggcgaggcagagcaaaaaggggaaaaagcaacggggcggcgagagctcgatttatggcggcgggagcatctccggtgttcgaggggtgcgttcccggcgtcggattggacggggacatgctagaacgaggcagcgacgagaggcggcctccgggacagagcaaggcgtgcgatgggctacgtcgagcggcggcgggcgcggcgcggcgtgcggcgggctatggcgtgcggcagtgggcgcggcacagcgttcggcaagacgaagaacacggtgggggctcaccgacgagaggggagcggcgttggtgatgcggagggagtcgcggcgaggcggcgcggcaccgagagggcgcggccggggaagaagagagggagaggtggcgcccggagctcctcgtcacgcgcccacgcacgcaccggcctccccggtgcttggcgacgaatggcgacggcgcgagcagggcaggggcaataaggcggcgacggtggttcggcggcaatggcgcggtgggtgtgaagcgagtgaaaacgagagaagaaggggtttggggcgcggcttgggttttatagtggaggcaatgtcggtttgggaggcgggggcgagctgctgcttggctagcggccgcgagagcggcgttttcgtgcgcggcgcgaaacatggcgacggcgtggatgcgttgggcggcgaaggcggtggatcggacggcgaaaatcgaatacgggtgaacccccgcaaaaccgaggactagtatgtgcccatggaaccttctgctagcgtgtggggagctttgctctctgcatgtgctatgcataataacgtcgatgttggagagattgcagcatttaggctatttgagttagaagaaggcagtgctagcaattatgttaccctctgtggaatttatgacgcagttggtcaatctgatggtgttgcagggttgagatcaaggatgagagaactcggcatggtgaagacgcctgggtgcagtcggatcgatgtgaagggaagagctcatgctttctaccaggggagcatcccacgttatttgaggggatgaatgctttgggtattagatcagttactagacgatatggcaaattcagattctgaagatgagcttgctgacttgtactttgagttaactctgcactgaagttctgatggtgaaagtcatgtattgctgcaatcaattttgttcaaggaaaagcatggatcttccttgatggctgccatgccactcatgaacaaatttgaatgaagaccaacaaataatcctaagaaattggtcaatctagatgccttggaagctgaaacttttcaggaccagtatctggagcaacatcctgcatcatggtatggtgccaggatgagagcaatagggtggctcttctggtccaaacgactggtatctagtctgaggtgactgcaatgacagtaatacatgtgtaatgttgtcagtctggtttatcggcatatggctcaaatatagtgcttctgaaaatatgcgacaatattggatgcaggagaaattgtgaatgattggcatataaaagattatctcttggattaaataaaagagcgagaatgaatggctagtatttaaaaatgggtggaaaattatttccctttcccatttgacaaacattgccttatagcaaaactgaacgatttgctcagcacctccgaccgagagcaggacaccgcgccgacaagagagcgcgcgagccgcagccgcgcgagaggagcgaagcaggccaagctattaggcccattgggcttgtcttttttgtgtaaatggggcttttgactaggaaaccctaaacccaaatttcccctttctccagttctcccatccccaatctgtgcccgtgcgcgaggaggggcgcggcagggcgtatagcggcgggcgcgcgcgcgggtcggcggcgcggcagccggcactggcagcgcggcgcagcgcagggagcaaggcagaggcagccaccaaccaacagggactgaagtcaggcagaggcaggcaacaagctaaagaggaggagaggaagaggagagattaggaatgttgaggtattgttgcgtttctcgtctatttaacctttgcaactgggatgatggattgtgaactcatatgactagtgcttgttgctatgcttaatgtagacgtgatggataatgctgcgtcgtataatatcgtgaattgatattgcttttttttttcccttcttattctgttctaattctcgcgcgctagttcatgtgccacacctaattttttttctgtcctccgccactgaccttatatgcgctagttcatatacgattttttttttgtcctccgccactgacttatatgttctttagtttgctaaaatcctctcataacatacattttagctccttcaagaagtggctcctggttttcttgctctcctcttgcgatattgctgggtactccctctgtttcataatgtaagactttctagcattgcccacattcatatagatgtcaatgaatcaaaacatatatgtgtgtctagattcattaacatatatatgaatgtgggcaatgctagaaagtcttacattatgaaaccgatgaagtatttttcttcttcttgatatatcaacgcacaaaagctttttcagtgttcgttgaaaaaaagagcaaaattttctcatgaggaattaaaactgattttcttacacttatgattccttaaattgcaaagttgcagtgagttatttacagcccctcaaatttccttttcgccaactattccttctaggtattgaacagaacgttttgcttcttctatctatttttataattattttgaggtacacatattgcatagttttaagctcgtatcattagcatatattcaaggtctgatagattaatcttatgggtgcaggtggcaatagccgaattcatttctcaatgatgagccctatgtaaagttgtatacttctccatattgcacatggttctgtgccggcagtccaaatatgtattccaatggtgcagacacctgagaattccccccctgggactctcttcctgccccttctctgtactgacagcttcagcttcagttcaatcagactgctctagtgatgatgaaaaactgaattgtgctccgtctcaacatgcccggaaaagatcccgcactttgtgctctgatagtgttgtacagactctccactgcctaaagagacgacctgccattgcatttgcctactttaaagatacacagagcattgggtttaatcatgacttttcaacctactcagagatgattcagattctatcccactcacgccaggggaagatgttagtttcattgttctctgagcttgtttcaagtagtaatgctagtggtcctgaaattttgccccttgttgatcaccacagaagaacatgtgctactccatgttcactctcgttcatggttgattgcttgatcaaggcatgcatcacttgctatgatgtacaagcaaccatatgcttatttagtggcatttgcaggcttggagttgtcccatctgtttggacttggaacctgcttctcaaatttatagctgagactggtgaatatgagatggttctcgcagcttataatgaaatgaagtgctttcagctgactcccgatgtttatacatttgccatagtcactaggtcactttttcaagcaaagaaagtggatgaggctttgcaagtttgggccgagatgactgaaatgggagtgaaaccagatgcacgtgggtactcgtcatttctaattggtctgtgtgattgcagaaaatatgatttagcttatgttattctacaagagattaatagggagaaggttcctgttgaggccatggcttataacatggtaatggatggactatgcaaagaaatgagattggatgaggcggaaaagctcttggaaaacaaggccagacaaggatccaaccctgatgtatatggttatagctatctgattcagagttattgcaaaatgggcaacctaataaaggctgtggatcattatgaagccatggtttctcatggtattgagacaaattgccacattgtgagttaccttctgcaatgcttcaggaagttaggcatgacatctgaagtaatcgcgtatttcctgaaatttaaagattcagggcttcatcttgacaaggtgatttataacattgctatggatacttattgcaagaatgggaacatgaacgaggcagttaagctactgaatgaaatgaagtgtgggggtttgacacctgacaaaattcactacacatgcctaatcaatggttactgtttgaagggagaaatgcaaaatgcacagcaggtatttgaggaaatgctgaaggccaatattgagccagatatagttacatataacatattggctagtgggttttgcaagagcggtcttgttatggaggtgtttgatcttctagaccgtatggcagatcacggtttggagcctaattcactcacctacggtatagcaattgttggattttgtagaggaggcaaccttagtgaagcagaggttctatttaatgtagtagaagaaaaaggaattgatcatatcgaagtgatgtacagttcgatggtttgtggctatttgctttcaggctggactgatcatgcttacatgctttttgtaagggttgctcgacaaggaaatcttgtggatcatttttcatgttctaagttgataaatgacctctgtagagttggaaatgtccagggggcttcaaatgtttgtaagattatgttagaacataatgttgtacctgatgtgatttcatatagcaaactcatatcaatctattgtcagaatggagatatggacaaagctcacttatggttccatgatatggttcagcgaggactttctattgatgttattgtatacactatactgatgaatggttactgcaaggctggtcgtctgcaagaagcttgtcaattgtttgttcaaatgacaaacttgggcataaagcctgatgtgattgcatatacagttctactggatggtcacttaaaggagacccttcagcaaggttgggaggggattgctaaagagagaaggagctttcttcttagagcgaatcataacaagttattaagttccatgaaagacatgcaaattgaacctgatgtaccctgttacacggtgttgattgatggaaagtgcaaagctgaatatctagtggaagcccgggaactatttgatgagatgttgcagaaaggacttactcctgatgcttatgcttacacagctcttataaatggatattgtagccaaggggaaatatcaaaggctgaagatcttttgcaagaaatgattgacaagggaatagaaccagatgaattgaccttttcagtattaaatcagagttccttgaggtctaggaagattcagttctgtgcatgattccctctgtggtaccatgtttagtaaattctttctactgagaacacctatgtcaacagcaaggtgatgcttttatcaatcattagttaattggatttttctcttctctgcttataaaattggtcacaagtataatcttatcagcagtatatacaattctctgcaagtgtttctacacttgacagggaactaagtaccaacaattgtgaaatatactgggcatagcttgtgagtctgatcaagtaatttatgattttcaggaggtcaacattgatgatgaagaactttctgtagaaattcgcaaagaaaatgaggctcctgttgttgagagaaaagtcaagaacatttcagataccaacattaagaggttgtgcatcctacatctcagtctgcttttcaagcagacctccttgcaaatctctgagtcttcgtgcaattgatggccttgttaaaggattggaggccaatcaacgtctagtaggtgacttgaccctagcaacccttgaggacagttgaactcagttcaggtactagtgtattttgttacagtatttgttccttaagaggtactccctccgtcccaaaatataacaacttctagcttctagaatttatcctaaaatataacaacttttacaccaacattctcttctcaaccaatcacaatcctccaccgttcaattttcctacctatctctacttctcatccaatcacaaccctcatgtatttaattctatgtactttcttaataaccgtgtccaactctaaaaatgcttatattctgggacggagggagtattattttttagtctcggggataaggtatactctgtcaattctgcactattcagccaattttcaatattgagaagtttcaagcgtgctaacaaaatagaggaggacgctcattcaggttgcatagatcgtacttttgcttcattaaatgtatccactcacattattttattagtatgttctatatattcctgcctaaacctgcttcatggatttctttttcctacttggccttgttttgttggattaaaagcagagcagcgcgcttgtcatggtcttcttttttactggggatttgatctcttttgtcagcacaggctctgattttacctccctagacattcaaaatgggaactctcttcagttccagatactgttcctcaagaacacaggtactaattgatgaagtatcctctaaaagatacgttgaatatagtgctttttcatgttcccattcctaatttcattcattccttgtatgttgtgttctctaggtccaagttccacttaggttgtgagtctctgtgcaagtagagatgtgatttgtcaaatttggaacggcactagtaattgtcttatctcatcatgtttttctgagtgtccaaatttttaaccttttcttttccttcagaaggtaacagactttgcttgtatccaggttaatgtcaaacttcgattccctgttgtattgaattaattcatggaacctacaaatcttccacctgaagattttttgcctgcctggaattctggaaagcattagctgctcagtctctgaaagtttaagatgtggtaaggtttcagttctgttgtggataactagtgagctgtgaaggaatacatttttttcatgaaatgtagaattggataatcttccctcatggttttgcttgttttttcttgttactgatgatttagtgtgtcttgttagattgttactattgccttctagcataatggatatagcaagtatgtttagctggatagtaatgttgtgctctattaaaaacaaaggaacaatggagcggattgcccttaagtttctggtttctccgcgtggtcgaggctctgattggcgactttggtgggcaaagcccttctctaatatccttattgtttaagtttccaaagtgtatacaacctctatgtactaggtggcatctaataattagggaatctgacacaaactaggaatatcaaatagaatacataaatcaagctaggactagaattatgaacatatctaacgcaccatgccaatgtttcctgcacctatggtatttgatcccataacatccgtaacagataacctgtatgcagatggaatgttgcaaatcatgagtcctttactgacagcaattgtctaggagaaaattctagttagtgttgcagaaaattaggtgcctctttgccagcaaattcgacctttgatgccatcattgttggtgtagcagaaataatgtcatcaatgttcaatgcagtctcagttcaatgtaggtcaaatcaaaactttacaagacagatgccaacttcagttcgaaatttgagtaaagcttgttacagttctttttataaagttaatagttaatggctacggggaaaacagaagttgaccgctgttatttttgccatgcaggagttcatcaaagagtctttaattgatcgattatccttagggataattggttctaattcggtctacattgcaagccataattccttcagaagtacctgtcacaatggcagcacaatgaaaagtggaaaacaaaagcatcctgccggcaaaacgacttgtggctgaagaacaatgatgaagcaaggggtgacgcagaagtatttattttacttttggccgggttataacttataagtcccttgatcgctgcaggttataagctctgggaatcttcattgccctaggtctagtgttgaatctatgtagttttttatgtagttttttcaaccaaaatcaatcttgaagtttgctgtttatgtgtaattacgatttgtaccaacaagattagaatgtttagctatatgccttggattgattaactaggctcagtttttctctcattcaagtgttcaatgaatgaaatgtatggttctctagcttttcttttgtttcaaaatccttagtttttgggggcttgtgtgtagatggcagctgtatctttcctgtatataaagctatggttgtagaaaattatagggcgtattataaattattataggatgtattatatttgatggttaagatgttcctccttttcagtaatgctaagctattatttgcattcttttgtgtggcccatacagccctaccaattccctggtagtgcatatttgaggaatttgaatattactcaaactgaatattttggttttacatgtggctgttgagatctgtgttaaacgttgattgaaatcattcccaggcaaaagagtgttaggatagcctgcagatcaaacagtccaccttcgaatatactacagcctgagcaaccactgttcttgctgaatttcaaccaaaagcaagtcagtcgctctatgcaaatcatctgaatctaaacaagttgacacaaaaaaaaagattttccatgaaaaatcaacttgtatgcaattagatgaagctaaacaactattctctccgtttcataatgtaagactttctaacattgctcacatacatatagatgttaatgaatctaaacagactttaaacagacttttcagtatataatgaatctaaacatatatatatatgtctaagattcattaacatctaaatgaatgtaggcaaaaatcttatattgtaaaacggaggaagtagcaacatttctcaagctccaaccaaacgatgaaatttccatggagcagtttacttgctgaatagttgaatcaattagacgattgaaacaacctcttccacacttcaaaacctgtcttatctccacaggggttaaaaacaaaaaagaaaaaaaaaagcgaacaaagaatcaagaaataatagatgtagcaggtacagtaggcaagcaccaacacctcccctccaacctcacactatggaaactactaattttttacagaatacaactcacacttcaagatcagcttcagggcaacagaggcaagggaagtttgatattctccctaccacagattttcgtcggtttgtttgtttacgcgttctcagctgctgcatgcgatcgctttggtcgccactctgtgtgtgccttcacaatgtcagccttcacaagatggtcgcactggatggcagaagcctgcttgtcggcgccaatgctggtgcattcccctgacacggtggtaagtgattgcagcacgctgtctcggccacactccttcctgtaatccagggtcatgcttgcaagctcatgcttctccagtactgaaattggagcactctgggggaaaaaattagaaagaactcagaaacatgtttgaaagccttctgactgaccagatgtaagactaatgacaatatcaacaatacagatggtcagatcagaatctctagaaaataattgcaagtactacataaaatggttccctaacaactactccctccgtttcataatgtaagtcattttagcatttctcacattcatattgatgccaatgaatctagacacatatatctatttagattcattagcataaatataaatatgggaaatgctaaaatgacttacattgtgaaacaaaggaagtaccatataaaaggataaagccaaattatttttctctaaacaatgaatataagggacaagaataaccacctcaaggatccacccaatatatttaacattgttcacatgctgattgacatcgaggtcaccccatctaggctgttgcagtaaacaagagtccatcaaatatcatttaaaataaatgaggggtgagatcaattattactgtttttcttagataaatgatagcagttgaggcataatgataattcagtatgtaaccatgtctagctgacttacagtgagcccctttcttatgaattgctctgtagcatcatcaccaactttatttcctgtctaggctaacttttcactctgctcctctgttatagctgaacggtcattgaaatatgggcctatttcagctctaacttcatctggcatttttgaaagtcttctagttttcttgtgcatcatcacccaaacactgcaacaaatggattggaaaaggagcacaattagtgattatcaatgatgtgaccaagcagaaataccaagattggatgtcctcacaaaaaaaatgatacagatgattcttgcaatagaatacagttgaagcccaaaccttgtagctctcaagattgttcggccagagttgtagtcacgaacatgccagtctcgacgcatgccatttttgccagcagcagcgacccatgtgtcaacttgaaccatatctcccctaaaaccatagcaggttggtacaatacatctgtcattctttttgatccacagaaagacatcggcaattgtatctgaactaaaaaaacagtttgaaattgcacttccatttttctaactcaaaaccccaaaaaagaagttttcaaccacttgttgacacagttgacaagaggatttaaacataacgtgtgaatagtagtactagcaccacttatttgatgaatgatgaccacctagaaatttaaactgacagatgctgttcaacaaaagttcactgttctagatcggtccttagcttctcccatgatatggcacagcattaattgcttttgttcttttctacacgatggaatcatttactgcagcccaataaagggaaactttctgaattgtgatcccttgaggtgtggtaccctgtacagacgtcttttaattcaagatccaagaaagcacaggacagaacatttaatgaggcagctctgggcaatgaatatgaagtaaccagtcaattatctattgggactaaacctctccctctatccactaatcagttatgttttcgggagagcattgtcctgctaagtgatgttatacttttcaagacaaaacagggcaacagagttaagtgctgccaaactcaggccttggggtatcgtaactttcatgctgcttgtaataaagctagacaataactttaatatgaactacccgagtggtaaatttttgtttataaatgcaaataaatcacttgctaatttatttttaaaacggagcttatcgctggaaaacgtaagtacatgcccgttctggcattcccactcagcataattcaagatccaaggaagcacagagaagacatcatttaatgaggcagctttgggcaatgaataaggcgtaacaaatgaagttgctcttggatctaaattactactccactaataattgacgtctaaaggagagattactgttcttttaactgatgttgtgtcttttgaggacaacatagagcaaggagagctacagacttacagtgctgtaccaaaaaggccttggggcatcataacttttatgttgcatgtactaaagctagattatgtctttaatgaggattacccaagatgcaaatcctgtttctaaatgcaaagaaataacttgatagtttgtgttataatcagggctcgacaattggaaacaaagtgcatgctcctcccacttaagtaggaatatattcatttcttcctaattggaaaatttagtttgccacaaaatctatccttgatccaacaaaactggagctgatattactacacatttcttagtcaaccaaggaggaataacagaacctccaaaacatgaggcctatcacgggaaatcaaagaaaaacatggccttctatagcagtataaaaacttcaacccatattcttgcaaacctgcagcagcgaaatttacgagcaagtaaaagattcacttgattttcatcaaccaaccagtgtatggagaaatcagaccagagatccacacaacaatatgataaaccatgttaaagtaaatattgagctaaatactactgttgcttgtgtaagaatcttctttaaacaaataaaaacaaatatgcaaaggacacacagctgtaaagtagtacataaaacgatatctgtaaaagaagcaaaacaaatatgaagtaatttaaaatgtgaaaattaaatgacaacttagagtaaggaattgatagaaagaaaccaaagatacatatatcaagaggagcaaaggtttgcaaaaaagtaccatgcggggtattgctcaacaagaagctggattttgctgacaacccatatcaagttccgtttgctcatctccggtgtagccccaaaaccatctccaagaagaccagcagtccttacatggttaagagccgtttcctgcaaaattttaaataattgccagcttgaaagagacatacgaatctataacaaaatgctgaaatgagaaatgaaactaaaaacagaatgtgcaaccacttacctgtaaatgattcatcaatgtctctatagaagctgtacgatcagcgccaatctcgtaggaccgaatcatgaagttctgcctaaacaccataccgtcctggatgatcctaccaaagccaaatgtgtcaacaagcatgtcaggtttcttcggcttccaatcaagcagtgtccactgcttctctgcggcgaggaagatggttgtaatagccgcaagaagcatgctccaatccggcagttggttatagaacgtctttggagcactgtgaggcaccgtttcctccatgtcaggcttcaccgtcttgaggttaaccttcgtaccattaaccttgggaagggtttgagcctgtgcctttacttgcatggctgcaggaggtgggttaggctttgcgacaatgccacagacactcaaattctccggcaattcgccggtaacagcagcattcttggagcttctagctgatgctgcaggagatgagcctggacctgggaagaatgctgaggcggcaagagaccctgccatgattgaacttcccctcacggcccaaaattcgtttagaaatcaatcacacgccaaaagcgctaacctgaataaacaatcaattgtatcagacactttacaacaatgtagctctttggaaaacttaaaagaggagaaaaaaaattgaggcatgaactagtggatccacccactaaaaagtttgcctcctcatgggggaaaaaaggcctcatgtatcataaacaagtacacccgcgaatttcacaaacgattcgaaaccacatttgaatcaatgcaggcaaaaatgaaccatatgccccccgatgaacaaaatggcattgagaattgggaggacccaatatcggaactcgcaggggcggatccaacttgggacatgggggaggttaaactgttactacttgtattaaggctctgaaattaaggaggagaagagcttcctccagatctagaagagaagaagctagggttaacgaacgaacgcacgaacgaacgcgagcaaattccaggcaaaagtagtcccccgaagctagaatgggagagagatgaatcaggaagaggaggctcaccaggatcccctcccctgctctgctctccttggcgatggagatcggcgcccctcccctccggtgttgagccgcggctcgtctttcttggcgcaaggaaggagacgacgggagattttctcttttctttcatttacgccaaaaaaaaggaaggggaagatactctccgccttttatctctaacattttttttctttattattggctggtggcccacgtatcagcaatactaagagaaaaaaataaatatttcgattagagattgtgtcagactaccagaaaccacttttattttagccaaaaaaaaagagaaggagaagatacccccaccttttatctcaacattttttttctttacgattgattggtggcccacgcatcagcaatactaataagaggaaataaattattattattatcaaacttgattagggattgtgtcagaccaccagcaaccactaactttagtgttgttacacgcacggccgccaccgacgcttttttttttcgagtcaaaaagggaaggaaggggaagatactccaccttttatctcaacatttttctttatgattggctggtggcccacggatcagcaatactaagtgaaaaaaaataaatatttcgattagggattgtgtgagaccatcagcaaccactaactttagtgtcgctccacgcaccactgccaccgacgctctttctttttgagccaccatcgttccttctctccgcctttgtatgcgcagccgcgccctttggttatcgacgtgtcttttctcctacaccattgtcatgcatattattgtcatggttgccattgaggttgaggctgtcgagcttgcagcgtggtttttttcaaaaaaaaatgcatgaccatccagacctagtagagctagcaggtctaacctctcaagttgattccttttccatgtttcgtgtatgcaatgcctccacacactggtaggggtgcatgtgtccaaatatttgatgtgaggttttggctaaaattttttgggatctaaacaagacctacatgtacacgatcaatgactagaacccaagtcacaggctttactagtttattatttgtctgctctcttcgtttcaaattacttactccctccatttcaggttataaaacattttgactttgatcaaacttaaactactttaaatttaactaagtttatatataaatataataatatttataataccaaattagtttcattaaatcaataattgaacatattttcataataaatttgtcttgggttgaaaatgttattattttttctacaaacttagtcaaacttaaagcagtttgactttgaccaaagtcaaaacgtcttataacctgaaacggagggagtagtagaaaagatagacatacacatagttaacttaggacagataaaaaaaggtagatatatttaacttaggacaaatatagaatgagaacgagagagtaacaggtattacaatttaggtgcttaacacagttctaactcaagtttattttggagttgggttttttctagcttgggaaattgttgaaatttctttggttaaagctgttactactccattaattaatttggcccactcactaaggcacacaggtattttaatattcaactctctgaatattttatcaataaatagtttattataaattaaattctatttgatgaaaataatatcattggattatcatttaaatttactttcatatgactatggttttgttactagaaacattataatatatgacaaatttaaagtccaaaagtagcttttggctgtgttcggaggaggggttgggagcccctcctccccagcacgcaaaatgaagttcgttttattgcatgattaattaagtattaactgatttttttaaaaaatggattaatatgatttttttaaacaactttcatatagaagtttttgcataaatcacaccgtttagcagtttgaaaaatgtgtgcgcggaaaacgagatagatgggttaggaaaatgggggaaagaacacagcctttgaagactatgccaagtttgatcgtaccttaataagtgagatgaatggagtactatgctaagaatattagggtatgatattttctaatatttttatcaaaataaaaagattatgccactttgatttaatctacaaagtctgttttttctctaaagaatttaagcattggagccatgtcaaacagggctgatttgccttttatgctgcacatatgggatgacaaatcttggaaactagatgataccccgcgcgttgctgcggaatgttggtgtataacatagttgcaaaactataatatgtaaatcaaatattgtaaatcccactaagaaattagtcattaacagtcaaaacaggatacatggaggttagaaagattatgcaataatcttacccattagcaatcacgggctagccaaagtacaaattgcagttagcagattgtattatcaatgttctcataaattaattgttcgaagaattaaatttattaaaaaaaagtgaagttttgtgagaacatctcaatcaacatgtttaactcgtacatcagacttcctcggccaacatttaaatcatcacgttaattcatactgctaacttcactggctcaaaggatgataaatatatttatgtagagattaagcttatatggtctattatataactatgaaatactactacatgactaacacatctaggaatagaataagaaaatcaccttatgaaatcatgaagttgatttatagtagctgacatatataaggtctgaaaaggggtaaaatcacatattattcattgcgctatgctgcaaactggatcgaattctcacctgtggaatttttttctgcatgatagaaaattatttgataagcagaaaaggagtgcagccttgaaattttccgtatcactctcatggagaggaaaactaagttatcgtcagcaatcgtttcttggaaacgtaaaattctcttcaggaatcagaacagaattgaatacaaaggtagaaatgtctaatcaaaatttacctcgtcaattagggtcagatcgatcatgtaagtgacattacaaaagataaaacatagcgatattatcaagttatatgtccaaaaatggggcaatcagaagaacacatgcatgctattttacaaaaaggcagaaaaaaatgagtacaatcatcaactcacctaatagctatgttccaatttggggatcgagaaaataaactcagcattggagaacggaagaaaacatgcacctgatcaaaaacttgaaaactgatgggattaagaacggtaaacacaaagaagacaccatgcaatcggctaatgttgaagctaccatcaaatcatgtagccgaaggacaaattaaccatgaaccctgtaatatgcccaatatagtttccagccaatggggcagactgaagaatacctaaagcttcgctatttgatgtaaggggagaaaaaaaaagagagtacagtatagacatcagcttaaccaaaagctgataaatttgggatcgagccaatgaactcaacgtaggagaataaggggagagaaaatgtacctcatccaaatactgatgggagtaggaaagataaacaccaggaagacaccaatcgcctgatgtcaggagctgcaaatgaaatcatgttgacggaggacaaattagttgtttaccctgcatatatgccctatatagatctcattcccagccaagatcgaccaatgttttctgaatcgaaagatcaaatcaatgcccggataatccatatgagccaccagatgaattggacgggaaattgatgaaagccctgataatccgcatgagtactggataatgataagatatcgtggtgagcgccgcgccgggattgaaagcctgcatacttgatactcgcagagcatcgggagaaagcatcgatatttagcatgaagaggaggaatggaatcaggagaaagctaaatatttatcatcgatatttagcaaacggagcagcgccaggggaggggggaggggaagggggaggagaagcgccggagggggggtgtggaggagaagcgccgggagggagagggttggaggagaagcggcgcgaggatgcgagagctgccggcggtgggcccgcacctggcgcgcgcgattggggaaggaagcgagcggtcggcgtcgggcccgcacatggagcgcgcgatgtggaggaagcgagcgcaggatggggaagggaggagtcgcgcgcggcggcggggcggagaaatctgcgctcggtggagaagaaggcagagcggttagggtaggatagaacgcatccgaccgtttgcagcgcctgatcgaacggctgggattaaaagagtgacgtggcttcaccagaactcagcaaaatcctaataactgcattaagtggggatcacttgtatagtattatattataggatgtcatgcttttgtttagctttgcaataacagcatacggagtatcttggatgaggagcacgctgaatccattggttcaattgactccaggtcttgaatctagcaaaaccacaaaagatgttccgagacttccatcaagctcgattggtcggccttcttgaaacaaggcatacagttgtcatgaagattaagaagaaaaaaaatctcttctgaggtgaaaatactctctgaaagagcataatattgtaatcagtggcacatctctcttttttttttctcaggcagaaaagcttttcattatatgaatatgcagcagcttacaaaaataatgcatcgatcaagcacatgtaatgtatatatgtacagtacctatagaatgactaactttggccggccttctatatttcttgtgtgtaaaaaaggctatgcatatataaaaagaaaaccataagagatagatatagaaaagaatgaagaactgcaactatatatatactttgtaggtagtctatattactccagagattctcaaggatgaaagtacaacaaaaacaacccaaaggatcatgaagtacactgatgttgcccaagcccacatcctagggccaccaagctcggcgccaagtatgacgcgacgaagaaccaaaaccgtgatgcaaccgaacgacgtcgcgaagaagaccagaagggagaagctgaggccagcagcattgtctatgtacaggggcttcttgtagacaaaactagcatggtggcccgcgcacattgcgcggctagcatcattatattttctctcatataaaagcatatatcttttctcattatattattataaaatatattacaatgacaacataattttaaattttgcaataacttttcaaaactactaacgtgtaataactactctagtctcctcttctaatatttcttattttttaattctgaatttcagctatttctaaattgtatttctatatgtactctgccttttctttttctctgattaatgtgagaatttctaggccatgagagcgaacgtggaggctcctttttattccgaattttagttggttttaaattccaatatgaactctatactctacttctaatattccttattttttaatttcaaatttctattttttacttaattgtatttctatatggactctatactctacttctaatatttcttatttttaattccgaatttcagttatttcctaattgtatttctatatggactctatactctacttttaatattccttatttttaattccgaatttcagttatttcctaattgtatttctatatggactctagtctcctcttctaatattccttattttttaattccgaatttcagctatttctaaattgtatttctatatggactatagtctcctcttctaatattccttattttttaattccgaattttagctatttctaaattgtatttctatatggactctgctttttctttttctctgattaatgtcatcagagcaaacgtggaggcttctttttttttccaaattttagttagttttaaattcctatatggactctatactctacttctaatatttcttattttttaatttcgaatttctattttttttcttaattatatttctatatggactctataatctacttctaatattccttatttttaattcagaatttctattatttcctaattgtatttctatatggactctatactctacttctaatattccttattttttaattccgaatttcaactatttctaaagtgtatttctatatggactctagtctcctcttttaatattccttattttttttaattctgaattttagctatttctaaattgtatttctatatggactctgttttttctttttctccgattaatgtgagaatttctagaccatgagagcgaacgtggaggctcctttttctatttctttaattatataatagatagttgtacattgtgtccaccaaccatggaacaccaatgccgacatatatgttcaccgaattgctgcggaaataagatataccgtttatcccgcctcgataagataaatttacaaaaggttgaaggtaggcatgaacaactaattggagaggagatgtgcagaaatgtacctgcaagtgatgttggcaattgcggagtcggcggtgatttgacgctcagccgctatcttgcttgcaactagatcaggccatgatgttccagcagccagtgctgtgaatgctataacatatggacttactcctacacaggatagtagattttgtatcagcaagcaagcagctacacccttgacagatgataaattgaacttgtacaggagcatgttccaacctgtgacacagcttatctgatctgtaatcttagtaaccccataagcaataccacttatgaagattagtgagcaaataaaagcgatccagccatgagcaatttcataagggggaatgaaagcaaatagcattttccaaggtgcaatgattaaattccatgagattccgatgacactcaagcaggtagaatccatctttcttgacactgaactctccaactgctcacataataacaaaatcacttataaccaatgggaatgctgtagcaatttttgttactttcaggtcaaatcaatgtacttcaaagacttaaaaacgagtgcgggttaggtttcaattcaatgttaaaatctgctaagaaggattcatcaactgaaggctgtacactgttaggcttgtggtaaacactcttaaacaaagataaaagaatatgctttactattctattttgcctttggtgatatattaaaaatggtaaaccaataacacaagaatacagcacaagagcggcataaaatttgatttggtgtgacgatattcaacagataaagctctcctgactgtataagttatccaagtcgtacacccctgtagttccactgaatgcgtaactagaaataagttttgcagttgtcttataaagtctagaacatccttctcaatccaccataactctcattaaaaaaatatcttgtcattgttatgtccttgttggcttgcaaaattaagttttacaagtatcccctcacaaaagtatccttgccaaactactttgatctaataactgagcattaattctaatttaaacaggaaatggcattggcaaggtataatatatagagtgatagtgaattaaattaccgttgcagcatcaacaaattgttgccaccaaatagaaaaccagtgagtatcctcccatttgttctttaatgtaagacctgttggagattcttccacatccttttctgaaacatggtgataccctgaaaggcaataagaaactactttcagaataattcgaaccccgaagaattgttacacgaagtaaagaaaatagtgagtgaaaaaaaaacagaaattgattaccttcattactgtaagaacgcgctgagaatatatccacaatatcctcattctggccagggagtatgtccccaatcccatcatagttatcgtcataatcaactgaagcatcttccgtcggaacccaatcttcaggtctgtcacctcttgccctgttttcagcaaataaaactagaagcatcaggaaagtgcatccttaatttgtacatggccacaggaaatatattagataaaaagaacgattatttaagggattaggaccatacaaagggattgacacatatggccagcgcttatcctgcgcatatgcatgaagcagaagcagtccatattgcagtactgtcagcaaggcctcccagagggtgatcactctaggtgtccacacctgtatacagcgaaaagtactaatatgacctaatgctggatttagtgcttatagttagatagcaggatgagaatgtatggcttacctccaatataatatacagccaaatgtatgcccagaatgaccagaacagctcaactaaccaaacaccgagatcagatatctttttcttagagcctgcccttggcataaccacacaaacagcatgtatggggaacagatcaaatgcagcagaacccacaagggtacctggacctaaacctgcaaatcaaaagaaaccgaattagatacaattgcggatgctttggaacaaacatttgcacgaggtgatcaaagtatacctcctgctgtcagctgacccagatttcggattgcgtcaatcgttgctagtgaaatttgagggaagctagtaccaaatgcgaggagagcaacgtccgctatagtgtagttccacaccttctcatgcttgacaatagtagcatttgtgtgtgggtctattgtgacaacctcccgggagtgtctcatgatgctctccatcgatttgaagaaccggccactgatcgcggatagaccaataaaacagtacgcgaggacaacggtataaataaacgcacggacaccatttggaagcagtgtttctccattgaacaacaggtaagtatcacaggaaggagcagtatctgccatgttaatgttggccatcagatcagaggagtgctagtagcctagtataagacgagaactgcagtactcccagctcctgttataacacaaatgccagtttccatcagaaatactaacatcaacaaaatgttagcatatgaacaggaaaaaataatggctactacagtacagtaacaacctacctagttcagcaactaataaagtgtcaagcttaaaagaacttttttggctttttgagaaaaggtgcgattgcagcatttaggctatttgagttagaagaaggcatgtggtgatgatttttttgcaaaccagtgaatattaaaagttgcatcaatgtggcaatagaacagaataggctgctgtgagacatacagtactttgaattcctgttacacaaaagttattcccttattcatagttcatacagggcgtgaattaacaatcatggcaagctagattagcttattgcttacaaattagtttagattaaattaacaattgtgtttaattttaactcaggcttatcgtaattatcctcacactaatcctttgtctcttaacaaagaactaaacacctaatttttataagtggctgtgcatcttcctaggagtaaactaagaaatcatcatcctccttttcttttttcttcttctttttttttttttgcattttctgtattatagttcttttttttttcaaataaacattgatctttgatgggtctatttgtaaatgcagagagcacatgctttatccacagttgatggttatagtggttatggagctgaacagggtgaaaaggtatgcttatcactttactagcattttctgccaatacatcagcattctgatataggaaggtagataaggcaacacttatatacaatgataatcatgacaaaaagccatgaacaaaagatcttggttctttagtcctgggtaatttcacaactgccatctgtcttctagctgggacatagctttgtacatataagcaaaagtcttgagatggattgcacgtcgacaactcattcactgtgtagatgaattaagagctgtgaggttaggaatgcctttaaattgctaatttgttatgtgtagataggtgagtttgtgtttgaggagtaacctgtcattgcctttttgctgggcaccatccttgaacaatttcttagcaaccggaggtgttgctgtaggtgtaggccttcctctatttattgaaacgatgtgttagttacaatggaagaaatctttattattggaatgcacctaggagtgatcaaagcacctttttttggctggggtatttgtagggaaggatggggttgcttgtttggcttcttcagcagtttctggtagtccctttcccttgtaaaagaagtggcggttaagtctcgtgctaagatttctagtacatctcaggcgaagagatgtatttgattgattattaattattaatgaaaatatttttatttttttatttttaaaaaatatttatgattttttttttcaaaatatgcctcttttagcagtcgaggaagagtgctcactagaaacgatgaagtagctaagccttgaagccaaatggaatacaacctaagagcatgtataaatgtagagcctgattagctcttagcatgtataaatgtaaatgcagtgcgctagaaacgatgaagtagctaagccttgaagccaaatggaatgcaacaataatgtaatttaatttcttgggaatattttgtctccatatcaggatgaaacaatagcgtgtggattggggaagcaccggtattgtggtggtgtaatcgtggttgcgagacttcacttactagggtttaaatcatggtgcccacaaatatatacacacttgagtgtgatatcaataggaaatcagcgatgctatggatatgccgttcgtttcttttaacatgtgttatgggacgcacttttgggtgtgcgagcatggcatgcgtcttcggttaataaaaaaaagtgctgattttggatactttgttttacagtttatggaaaacaagtactatatataacctgtaggttgatggtcataaataacgggctatgcagattatcaccattattaatgtgttgtctctatttttatacggatactcaaatagtattttaatcaaggtgtgattttatgatacgtagtcgttcaacttacagtctaagaccctgtttagatgggagtaaaacttttaagtccctatcagatcgaatgtttggacactaattataaatattaaacgtagactattaataaaagccattcataatcttagactaattcgccatagcccaaagtacatcactagcatacaccattattttattttcactttggtctcgcctcaaaaagcttttgtccctagggtcattcttgtctttttgaaaaatttctctctccgattgagccggaagtgtcctccagcaaactaccatttttttagagtgtctttcagccgtaacacgttttcacgatgtctatcagcaaattacacaaattttgggtgtcctgtagcaaattttgccttttttatgtcaccaaaattacataaaattatcagaaaatagttactcccttcgagttgataatatttgtcattttagacaagagcacgatctctaaaaaaacaatttgacctttttttcattataatatatataaaagtgttaacaaatatatgattttattaaagtatttttaagactaatttatacatgtagtcatcacatttgattgacaaatattttaaaagtgattcataatcaaatattctaaagtttgacctcacacttgtctaaaacgataagtattatcagcccggaaaaagtagtatttatttagcacatctctaaactcaccaaaatcctattgaaaccccagctacgtgtccataatacccatggacactaggatataaaccgtatgagtagagtcatggatgactccaccccacatcaccagtattttccatttatttagtttcttgattatgcaagcataattcttgtcaaattcgaaataggaagttcatgtgttgctaagtcttctctaaaaaaccggatcaatactaatattgatctattctttaaaaaaaggtaatattgatctcgaatttgaagcttcgtttactggaagagataaagatgcgacgttggcatcaccatatcctgcaacggagcacgttcgtggtatgcgcgttaggggcttgtttgatggaatggagaagaggaagcttcaaagggatggatgaatattttccattgattcccgggggttatcttacatatcctacagttgctttggcgtgtgaagaatcgcaagacactattgttggtctcttaaaacggagtactgccgcctacttgcgtgctttgaagttttagacaccggatatatataaatgcctctaattcataaaatttgacacggatgtgagaatatggtacttctatgtgattgagattgttgttatagtttattgtttggcgtcaaatgagtatgggtacaataatcaactttgttggttgtttttctgttttgactttctgagagtatatttgtagcatagctagctgtgtgccaaatataaaattggtggtgttgagttcatgtacctgatgggttctttttgcaagtagaaaacaaatagatgttcatggaaagcacctagagagtccagtagaccagtactgccaaaacaatatttttacagagcagtttaaagagggttttgcaccgggaaaattggaaaccaaatgtaagaaaagagttcaaatataatagctttatttctgaacacacttgagttggccaaaagcaacagaatgacaacacatataggcttggagatcaaagttgcatcttaaagatcgtgtcaatatccaaaacgacgtgttttttaacttgagtgagtggattgccaatattgacagttgacagatgcctaatccaaattcctttgctagggatagcagtagtggtagtagtacacgactacacgggtgtagagttggacggcggtgtgacaaacgtttcaggctcttaagccccttcctcatcctctgacgacgtgttgaatcgtttatttagttgcgtgaccatcgcaacacgcagagcacggctgaaactttgtgctgaggctctcgagtttctcaggaaagcaaagaatgagtaatattgtaatgaaagaacatcttcagtcttttgttttttttttctcagcaagcttttccactgctgcgcttatgttccacgttggtcgtgtttttttctttttattcaccgaattaatcaaactgattatgtgctccatacttaacaaattacgctttcttttaaagaaaaatttcttctaccgcattaaccacttgttttaagttatttattaaatattcaatttatctcttaatcagatagataattcgcgatcaacaataatctaaatcaaacatgaccaaacatagttacatgttttaccggttcaacaagacaacaactcaaaacaaagggtgtggtctccctttttttataggcccacactccttccaacctgcactggcttatgagtccaccatgggtcacacaacaagtcacaactcacacggctcagtcgagaggaggaattagctttaagctggtccatgggcccaattgggcctgaagcacacttggcattaaacacgatagtcatatagggaataaattcactttatatccctcaatttgtcgccgagtcttaagttcatccctaaaccgaaataccagatataacatgtcctttaactccttaaaacagtgcaaacttgaccccaagatggtttggatgacgtgacgtttatatggttgatttgactgggtcctcatcccacgtggtgaggcacttgcaatcataaaaaatgggtgggacccacatgatagtgttagattaaaaataaagaattattgtgagaccaacttcatcaccccttcctctacgctctctctctccctcccctttgctctccctttcctcattgtccccgacaccagcgcacgttgcagctgttgccgaccctgccgacgggtgtgggatgctcgctccccaccattggttgcctcatcctctcctacgcactgatgagggaagaaggctggaatccattgggcaatgttgaactcgagcttctcccacggctaggagtgaacctcgtcgatagtgtgggcccagatgccaagacgggcgacgctcggctgccgcccttctccacacctcccgccgtgcctttccacgccgcccgctgcgtgccgccctaatggagatgggaagggagaggaagatagagggagaggaaaggaagtaatcgaacaacacaggcggagaatgaactcctacacaatggtgcgaaagttggaggtgttgatgatgagcacggtgttgggcggctggtaggatgctctcagacgcttcttcggcagctttgacgacgtcggagagggagggtgcggctgcggcgcttgcaaagagggcacccgcgtaggcaagagccacgcgatcgaccacgacaggagaaggcgagacgggagatggaggaggagagtcctaggagcacggtggccggtcggtccggccccaacatcgaggaaggagtggagggcgttggccgcgggcgacggggagatggtcgtggtggaggcgaagaggctgcgcagttggttctcgcgaaggcgtgggcacatagatggatggacatgacgatggtggtggcggcgttgttggcttgtggtttctcgacacgattatgcgtgcgccgataatgagtcgacaatataagggaaaaaaaagaggaggaagggagagataaagagggttgatgatgtaggtcccactgcaacttttttttaaccaaacactgacatgtgggtcttacagtttttttaaaaaactttaagtgccacattaacgccacgtaggcaccacgtcagacgaaaccgtcatccaaacaaccttaggatcttatttacgctagttttgggagttgatgaacacatcatatctagtattacggcaacaaattaagagacctaaggcgagtttagttccaaacttttttttcaaacttcgaacttttccatcacatcaaaacttttctacacacataaacttataacttttccatcacatcgttccaatttcaacgaaacttccaattttggcgtgaactaaacacaccctaaaatgaacttattcttagtcatagatagggttcactaaaccgttttgggtggggttactaccatctcacggtaaggtggttatcgcaataactatgtggttatcgtaaagatgcattcgattatcatgagatttaccatgattttaaaaactgacaaatggtgtgttcgcaagtgcaggatggaaaaccatccctcctgcacgtaaaacggagcggcctttgaacacataattaattaagtattaactattttttataaaatggattaatttgattttttaagtaactttcgtatagaatttttttgcaaaaaaacacaccatttagtaatttgaaaagcgcgcgtgcggaaaacaattaagaggggctaggaacatggggggaacatggggttgcaaacacagctagacccttgcgttcccgattgagcaatcgaagtaaaaatcgctgccctcagagacaatagcttttggacgtgaaagtacagagggagcacgcagagaacgaagaaaagagaagcaacaaaaggcagtactcctacagtgggggtgtgggacaccatagccttttcaggcttcgcagctcctaggacaccggcaacaatggagcagtcagccagtcagcagtgtgtcctcccctgtcctgtcctgtccgctcgttcggtgaggagatcgtcacgccttgctgttgctggccctcgggcggtcgggcactcgggcctcgccgcctcggcgacttgggctaccggacacaacggcgcggctcccgagccgagaccgtaccccacgccacgtcgcaggccgcgacgatgaccgatgcttcctgccgcggcagagcccaaccacacacacactgcccccacttagagcaagttcaatagtatagccaactaccggctccaattcatttatagccaatctaatagctcattcatacaatagttacatactgcactattaatacctagtcccacatgttatagacacactgcgtcttggagtctgtgctacagctggctataaatctgtagcccgctgcttttatctctcctgatttatctttttaaaataatttatctttttaaaatatgtttgtaggtgacttatagcctgctattgtacctcctcttaatattcccgcgtcaccagcctacggcgcctatacaacgccctacgcttgtcgtctccagcgacctgattccaattccatgcgtgcttgcaattgcagcccgcaggcgtttcgtcagtttgtcactggcgccggcgtaatcaccggcttttgcacgcccccccccccccagcgggttgttgcagcggcgcatgcatgaccaagattgcgagaatgcaacatcgagcttgggaattgggatgaaaaccaacaaaaaccatgcgaatggaagagcattatgccttcattaatccatatggacgacgcgacgagcagcattgtcacgaaccatggaagaacaggtactagtagtactaggtggtactctgtaatctgtactcgatgaacatcacagagctagctgaacaagctccagcgtaatgtactttgttgtcacttcgtgtctgcgtcaccggcagatcggccggaggcggcggcggcaaagctagaagccggaaggcatgcagggaagactgaagagggagcagcggccacctggtcggttgtctggctagggctcgccggcgcgcgacggcgcgcggcaggtggggcaggaagcgcgcgccgcgagccacccgtccacgcaggcgccgtggaagccgtgcccgcacgccgggagcacgcggacgcgctcgccgccgccgtccgccagctccgacaggcagatggcgcactccgcctcggcccacccgccgaccatcgcgacccccgacgccgcgctggccgcccccgagctacccgtgttggcgccgtcgtcggaagacggcttgggcggctgcgcctgcgccagcgccggcgccagcgccggcgccccggagtcgcggcggcgggcgaggcagcggatgaggcaccgcgcggcggcgtggaggcagaaggcgaggagggagacgcaggcgaggatgatgaggatggtggccacgttggagaagaacgcgcgcgagctggcgtaggggccccacgccccggcgccggcgtcggcattgccggggttgggaagcggcagcctcggcggcggggacggggtggcggtgatcatggccgccgccgccgccgccgtcgtggcgttcacggagggcgaggcggtgtggttggcccggcgcgtcatggctttctcggggagtggcgtgtgtcgcggcgtgggagtgggacggtaggaggtggtgtccttgtccgcgcttcggaatggtcgtcgtcgtcgtcgctatgcgtggccttttgtacgcttcttttctttcctccagaactggtaactcgacccagaccccacgcttcgctttggcaggcacgaattttacagctttttcttttttgaaattcaacatctactactcctaaattttgccgccattttaaggtcgccggagggcatgaatgaaatcctgaagtttttatggcaatcagttcgtttaataggaatcagaattttttttgttcattttgtaagaggcctactccctctgtcccaaaaaaaagacaatctctggtttccgtgttcaatgtttgaccgtccgtcttatttgaaaaaattatgaaaaaaaataaaaggataagtcacgcataaagtattcatcatgttttatcatctaacaacaatgaaaatactaattatagaaaagtttcatatataagacggacagtcaaacgttggcacgcaatccgcggtttgccttttttttttttttggacggagggagtagatgggtctaacattacatttttctactcctacatgctcaagcatgagtatacattttatactctaccgcggtagtacagccaaagcatgattgtcccggtgcatgatgctagaaagtagaaaaaacgaaaccgtaggtatagcataatggcactagtgatcaatcaagatgcaaaatcctaggaaataggaataccactttcctaaaccaacaaacggcaatagttaactctggtcaatgccattcgtcccgtaccaagaacaagaaggtcctacgggaccatccactgcgtccatagggccatgttgtagtagtcctccaacttttaggtccctcgtcgtcttcgcctcatcgaacccatcaaaaggagacggccaggcccattgcgcccccccccccccccccaccccactggcccaatcccccagaccttgaagttgaaggagggttggatatcgtccagcggcagcgctcgtgactcgtgtgagttcgtgagcaggggagtctctccgcgccgtgtttgctgtgtgcatggcacggcaggcacgcagctttatttatctttgggcgtcgcaaaggcatgaaccagtatcatgactcccaggcgcggggcccaatgacccaacttggcagcgttgccagcgttcttcataaaacaaagcgatcaagccaggaaaaattggtaatttggtatagacagactccagtttgatcagattggaccatggttttcccagccgaccggttaccgtgaggtaaccgtgcgttccgtaaagttaaggtaggggtaatcggctatagggtttgataaattttatctaaatttaaattttcaaaaaagaaattggaaaaattcttgtaagtactacttatacaaattttgtgataaaaaagagagaaggttaacataatagactcttatcgtttatgctagttgcattaacacagccgtaacagttatacctgcacagttgtagttctttttttttcattgtggatgttgttcctgtaactgttactaggggtggcaatttttccgttagagccagggccgggggagaattttcacctgcgggtgagcgagggtggggatcggaattaacccacgggtaacccgaaggggcaccggatgtgagttacttcctccgtttcataatgtaagtcattctagtatttttcacatttatattgatgttaatgaatttatatatatatatatatatatatatatatatatatatatatatatatatatatatatatatatatatatatatatatatatatatgtgtgtgtgtgtgtgtgtgtgtgtgtgtgtgtgtgtgtgtgtgtgtctgtctgtctgtctgtctgtctgtctgtttagatttattaacatcaatatgaatgtgagaaatgctaaaatgacttacattgtgaaacggaaggagtacctctctgaaagtagcccattgcaataatataggcccattaaactcattccaaattgacatataaaagctcaagacgctagtttccctcgacccttatctctttccttacttcaaccaacccccttcttaccgtctactatttcgttgcatcaattcatctccacatcgcctcgtcgtcgattcatctccacatcgactcgtcgtcgccgagtcaccaagcagccagccgctgtccaatttgcctcgtgctaatcattgtctattatgcatcatttcaattagaagatagaccatatgatgtatcaagtatgtatatgtgcttgatcatttcaattagaagatagaccatattatgcatcatttcaattagaagatagaccatatgatgtatgcatatgaccttgatcatgtgctttatgtatttgtgtactgaccgatgagtatacattgctattgaaattttgaaattttatcatattattattaggtgcattgtcctatttttatggagtattatctttatccgggtgatgcggggcccaagtcacccatgcgggtcacctacggggacgggtgatgttttccacctgattgccttcgcgtgaccggggctgaggatacctacaggaggatgggggcgggggcattccagcccaacccgaccctgccccgccctgttgccacccctaagtgtaatgcagcggcaagtagcacaactaaacaaccccatattctcaagccaaactaataatggattaaaaatgaccaaaagaaaaaggaatagtgaagattctttattgctggaatgtaaaaagtatagcaaaattcatgtcaaattttcttacattacatcaatacgtagttctatatgttcgaaatgcctccaacatactccctcaattccaaattgatctacatattttataggtacaccaagaccaagaaaagctaataactctctcatattatatttactctagcaacaaactcaatgcatgcaccatccctactattttctagccaatagcaaatcaagatattgcatgtgggttataaatgcttgtgtgcatggatgcatgcatcaatgtccatttactccaatgcacaaataacaaatagacctaatgaatgaacacaaatatgtatatcatttagaaataacctaaaaaaactatatgtagatcaatttgaaatggagggagtattcttgtagttatcctaaatttcctcttgattttctactgcgttttcccttttttttccccttccaaacagttcacaataaccgcagcttaccatgtggttaccgtctgaaatcgcgagtaactatctcaaaactatggaaccactgtcagatcaaaataatttgtttaaaattttgacgaattttatacggtttttcacagctaccgagcaacacccataatatcgtgaaggtcgataacccccgctgaaatagtatggaaaaacgatggattagacatccggctgaggtactattgcctcaaaacctcaaaatgtggatgccgtaaagattaattctccgggtttcataattcttgatattttgaacaatgaaacggcctttaaaacatatttttaactatatttttctatttataatatatacaataaataaacatttttttatttttattatagtactttgtgaaataaatctatatatgttattctagtgattataaacaaaataaattttaaagccattgatagttataaaagtttgttctcatgttcatcaagaattatcaaaccaaagagagtaaaacctactccagcttgtaaaaatacactccagtcacatgcggcattctcttcggcatttctagtaagcacagttatatcaagcggatctacaagcaaaatacgagaaactagcacacgttatacaacacaacaccgattggctctgcggcgatataatgtcagcagcaatcaaagaccggcggcggctgggcagaaacatgcacgaggccggcaacacaaagggcgcaaacggacgccaccatcaattttgtgcttcctaaaatcctatggacaatcagaacatgcagatacaccaagatcgaaaaggggaaaaaataaaaggagaaaaaacaaaagatcctttggtcagtcgcatcgtcgtgtcagccttgtttcgtgtgtggtcgatccaaatcaggcgaacgaagggatcccgtatctccagccgttggaggatcgccgccgggtcggctgctgctgcggcgcgaagctgagcccgaacatctccttgagaacttggcctggctcctggagcccgatcagcttggcgaccagggacgcgctctccctgacatgctccaggtctttcgtctcggtccagaggcggcgagcgacctgcagtttcctcctcttggagtccagcgagacaccccattttgtgtacgtgtgctccctctcctccgtggacagccgcttctgcatctgcctggcaagcatctccctctcccgctgcagcttctttgcgctgcattacagcagagcacggggcttatgagttgctcgtgatggtttggcgctaattttaaggttatggcacaaaagaagtgaatgaatggaaacgagtaatttacgcacctcgcaacaggggaagtactcaggctgcctactatcgcattgctaggggtgctcccccttgagtatgtatctctcaggaatgatagccttcgaagctccacttccatgtagatcgagtcagctgcttctcccttgaatagcaagaaaaagtaagtcctgtggaccaaggaaatgctgcaagcttgccaaagctcgatgatctcttgctgcttcttctcgaattccaaaggccatcgagaaggtgactgagaaacaccctcgatcgggtccaatccgatgctctttccatttgcattctaaaacatggatgaaatgccaataatttaattacttgctgaagcatagaaaaagaagtattcagcagaaaacactatttattttagattattagttggaatgctaatggtatgtggcttttgaggggtgggagaaattgttgaaattctatgatagagtcccaagagccaggatgttaaaccgaagcaatactatatataagcatgtattttccaaaccagcatcacataatcacatttttcttgaataaaacaataattaaatgaactgcagagctaagtgccctcaaagctaattagatattttcatacctggtcacctaactgcttctgataatgaacctgggccatctctttgagttcagcaacaaattcaccaataccagtgaattctgtatcgcatgcaacagacccatttgtctttgcatccttaaaagtgctgatctcagaactcatggatcctgcccttgaaagtgtgtcggtctctgcatcatagtgcagtgcagatcctcttctatgagattccacaggtcttcctgggaactccaccaaacttctatttagtggagtgcaatcatccatctccatatcgtcaaacatagtagaacctgtcagtgatctacagctcctgcttctaccaattactcttaagtttgatgagttacgtgttgaagatcctagatctttggctagactgacaaaaggccttctaatattctccaagtgttcctccaaagtaataggagcttcgccagagggccttgaatgcctagaattcactgatgcatttgaatcatttccatgcaaaccagaattcatatttgaatcttgtgggctactactttcaccagctgataagtccaactggtcatttcctcctgtccgattgctttcaatacatcgcacttccttgtaaagatctgaatcatcatgagagacctgagaactatcatctctgctgacgcttgggggcattccaacagatggagggcttctgactgaatgctttccttgaacctaaaatataaacaaaacaaacatgaccctgccggaacaacgagatgaaacaaaactaaatttcagaagtcatggcagagaatatacttgacggttcaggtcatgatcaccgacagattgcagcaaatcctgcaacctggattgagccaaatcacgttgtgacttcagttcttttatttctttctccatctgcaatggacatgacatgaaattttatggatgtgtgcaacagaaacaacaaactttttttgtcaagtagaatagtgtggaaatactcgtaatggacaaggcaaaagtggcagcaagtaagatagaccagatgcacacaaaaacaatagttttctgcaaattccagtatgagccgtggaggagaaaacagggaggtaagaaaagtgacaggtaactttacctttctgatttggttgtccttttccttcaataatgtttcgagactggaactctgaactggatgccgcaactcgctctccaatctagcaagttccttttgcaagtgcttaaccagtgctttatcagacatgaccacattaacctgagcatttgtaactacttcctttgcacaactcccaaatagcagagtatttcttgattgctcaatgtggctagtggcagggctcagtgtacaaataattgcagttcttgcattacctcccaaagatggctgtagtatgcgtgtaagctttgaatctctatacggtatgtgtgcattacttcccatgctgcattaatgaaaagatataactgatatcacttgggcgaaattccaagcaaacattactgtaaacatcccactttattgtacactatataaaatcccaaaagaaaatacatatgcataaagcatgcttaaatatgtcagcacacaaaaaattgtgcaaaacatgacatgtactacacaaaataaaatgatatatattatctgttatcaaacaaatgcaaccctattgcctttttatgttttacatatctaacaatatttttgcacaaattctgtgcacataatacatgctccaaatatatatctttcctagaattctctaaagcgacaagtgtgaaatcaaaacatatatggagctacatgactacagccatccttaaaaaatcatactctgtcaagcaacaaactattctctaaataagacaaccaaattttcctataatgtggattgaactaaataaaattgcacagtttcaagttgagattcggacctcagttttctaatgacagtgccaagggcaagcaaactcctattaatgtgacaaccttctttcagtcttgtgccagctgacaatgcctgagatgcacgctcacttccagccagatcaacaaagttctgcatggggagaaatggagaatgaataatgcatgcacctaatttttccaataaaaagaactccatgatagacttgtaagatgttattcttactgcactagccacaagtgtagttgacttgtcctttcctaagaactcgcgagcagagctttcaactgtctgaattgcttgacaaatacatcagccaaaatgaagcatagactcaaagataacaatttataccaaagtactacctccgtcccaaaataagcgcagccatgagtttctgcgcccaattttgatcgtccgtcttatttgaaatttttttataattagcatttttattgttatgagatgataaaacataaatagtactttactcgtgacttctgtttttaatttttttaaaaaagttttcaaataagacgaacggtcaaagttgggcgcagaaaaccatggctgcacttattttgggacggagggagtaattcatagatttgagtaaagaacaaaccaatcgaagtatctgatgggatctagaacttttttcgtttaagaaggtctcccctgtcctcctttgagctattgcaagtacataagcacatgtgagataaacggtttcaccaattacaaataatgtatgcctgctataagtaatcaattttgcaccttcacacacagaaataagtcccttgagatggttccaatcccttaatacaacctctgtaagattctctacataggtgcccttctgttgaataaatagcataataaagtcagaagcaaatacattgcaggataataattatcaaggataataaggagcccttttttcacctctgcatcatcccagagtctaagaggggtattttccgcactaagaagatcccgtataacttcattatatatttcaatcgcagagaacttcaacacaaaggctctctcttcatgctgaaaaaaaaagatcatttgaagactgtaaaatacgaccaaactctgacatgggatcagaagatggacggaagtttggttaccttgttaatataatcatatatatctgctactgtatattctgttactccagtcatagtgtatgtctttccactgctggtttgtccatatgcaaaaatacttgctgtaaaagggaatgcactctgatttagctcaaatgtcttaacatattttgaaattgtggtatgtgtcgtgtgtggtttgcactcacagttaatgccactaactacagagagggcaacttccttcaccccttcctcgtagacttctttggtactgcaatcagagtgaaataccctatctgcaatgaaaggatgcttatgttaatcatgcagggtccagaatttaacttggaggactgaatcaggaaattccaggtgacatgatgcaccaaagagaacacaattatctaggatggtgcctctggcataaattattaaaatgaagccaatctcaataaagtttctttaacaaggtgggctctcatctgggcaaccaaccacaaccattccctgcaatcttggactgcatttacttaaccagcatcaatcataattcttctaatattactaatccacgaaacactgtgttacagtgacaagttagttttagagaacagcattaccaatctactgtactatcaaaataaccttacatagcaattctgtacatcaaaatgcttcaaactgtcaatgacaaatgatatgaattgtaatatgacgaatatacacaattgtgaaagagtcaaagccaatatcttgtttgaaggttccatgaaccatgattacaaatgttatctactattctccaacacaagaatatctaagcaatgaccatctgcaacaattgtatcagcaaactcaccgaacgtgtatgctgttggcgccgtgggtcggtcagggaaggtgctccggaacatgacagtgctgtcattgatgcactcccactccgctggctccctcctagcaacctccttctcgctcagcggcctcagcctcaccaacacctgtatcctatccatcttcccggcgcctccacagccgccattgactgcctcagctgcacccatcttgtcccactgcaccagctcgtcgcctccaatcgcccccatctctctcccgctcactccccccttctcctatccctcttttctcctacaccatctgcaagcagtgcgggaccattatacaacagacccaaccaagaagcaaggcatataaaaaccaaaaggaacaacaagccaagccaccaacggggacgagatgcacgaattcgtcctgttgctgtgaatttgagtgcggggcaaggctgctgacgagattgatgcagcgggtggaggagaaggcaagcatttctgtggacccttacgaagtaattacgcacgtaattagtacagttgttagcacgtccgataatcggatacaacttgagaaccaccgattaatcaaatcaaatccatcaccaccaccaccccacccagctcctgctcaggttaccaatcatccttctcgcgaaatccccaaactaattaatagtactacagatctgcatgaaccagttcacccagacctaacagccgacacagtaccccccggccagagatcaacatcaccgaacaactcgccaaccaaccagcaatgctcaagcgagtagcagcgcccacggggagggagggagggagcaggccgttaccgaggctgggcgaaggcggcggccggctccggaaaaacgcaggcacgcggcggcggctccccgcggcgtgacggttgagcggcggagccccgcggcggcagccatggcccttcgagtgtttgaactccttcgcgaatttggcggtggaggtggaggttttgggggaggttggaggtggtggatggagagagagcgggcgcttcaccgcgtgcgggctgtgctccccacgacgatcttgttgaatttgtggggggagagagagagagagagagaggcgagaggagtgcaagagacggtggtgtacagtggaggagtagtactttgtttttttctttttttttttggtgatttttttgtttgtttgagtcttctccaacccaaggagaccgttgcgctgagtcgtttgtcttctcttcccctggggttgttttcaatggctctgtggctctctctgtcgattgttctttggtgggtgtttttgaatgcgagaccccatggagaatagggttgttgagtggagcccatgtacgttttttttggagcatacagggtgccatacggcatagtaacatgagctgtctattttacaatgctacttttaattctttttagaaaatgacattttctttacttatattgtcctttcggcatcgacatattatgtgtttcttcaattgtttagtacgagggataaggaggggatgaaaaacatcaatttgcaagttttcaaacagctactactgttgcacacaatgtaaacggctgcggcgcacagccatggctactagcaatctactagcgatagctatagccacaaccaaataaagggcagccaaacaatcccaatatgagaaagatgatttattttatagatgatgtcatacttacataggatttaaaatggtttaaaatagtaattgctaccagtgaatatcaactacgtagaaagtatgaagtatagctactatttctatttcacaatttttgtatgtaacctaccatgcacatacaatggagtttaaaaaaaactacaagaaaacgataatggacaaaaaaaacactattgacatctcactttgactataaattaattttaaatggttaggttccgatgactggaaattgtattgttatatatgtgaaatgacacttcaataatataacatatttttaaagtgtttgtaattgttttttcctagaagaagtagtcaaaatttgagatgaaatataatgtcaatgcaaattattcgattaaagagctagtaacaagattcggtgttgtcgaaattttggtagagtgtcggtggtccatttgttgccaaaactttgggaaattgttttagcccctttttttcttggcaaataatttggcctcggcaatttttgggcaacaaaccaaatgaacatccagtttcattggcatttaccaacttatttatgtcaaattagcatagagttaaaaatttcgtaatatatatgaatgggtacttccaaggagatgaaccgatattattaaatgcggggactatacacagtaccttggacatcacattggatactggcgagtatcgcacataattgaagtactttgctgaagatcatcaatgcagagagtaattccgagtcatgacgggcacggggtgttttgccacattcaggtatttaacacgccgcaaggaccagtgcatttcctaaattaccgttgtgaaaactaaattcaaatgtgtgaccgtacagaagccgaatttcacacaggaacttgcactatactatgaactgtagctactagtaattcacgtgtgcgacgaccttgcgatctggaatcctaaacatcatgtccccaggttggccttttgaacgacaaccactcaccaacggctataatcaggtgctgatctgaatattttaaacatgactgcatatcttgagtgcccctgccctggtagttaaatttggagtcagcttgtagccgagaatgctacctggcgatcgatcgctagggatcgctaggggcgatcaaatttctgattcccttactccacctgattttcttttttagcaccgtattactttcctattttagtaaatttataaacctaaagtttatacacctcaagtttatacatctccataatttttttaaaaaaataaaaagttagaaaaaattatgtatagaaatactatatataaaaaatttgaattcaaatttaaattcaaatatgaatcgggtacgtaaactttaggtctataaactttaggtgtgtaaactttagatgtatagaaatactatatatagaaaatatttgaattcaaatttaaatttgaatcggatataattcaaatttgaatttgaatcgggtatataaactttagctctataaactttaggtgtataaactttagatatatagaaatactatatatgaaaaatatttgaattcaatttcatatttgaatcggatatataaacttttgacttataaacttttagtctctaaactttagatgtataaacttgaggtgtataaactttagatgcataaattactaaaataggaaagtaatgtggtgccaaaaaaaggaaactagatagagaaagagagggggaggggtggggagcgaatctgatggtgatcgatcgcccattagacgtacccgtttgtagcaccttgtcgaataggagtattaggttctcaaaaaagaataggagtattaaacctcctgattttctctcgcgtttgtacttttcttggtctgacatgattagtctcctatattttgcttggaagtttcttttcaggatatacttataaagtctaccgagttccacaaagccatgtcggcaagcacaatactatactccaacggctgccagctgcccaattcggccggctgaccataacgaaccctcgtttttttggcgaatgaaaaggaacatacaggagctactcgctggatttcgcttacaacagcgtatttacaaacgaagaataaaaattttatatacgtgttcctaacgatctaagatcaaaggttgaaaaataaattcgatgaaaaaaaatctctaaatcaactccaaatttaaatttcgctaatatgcataaacataagcgacaagataaggtcataatccctcagtcccataaaaaaccaacctagtaccggatgtgacgaatttgaacatatagtaccggatttgacatattataatactacgaatctggacatatgttcagatttatagttctagaatgtgtctcatctagtactagattcgtttttttatgggagggagggagtacgtggcaactgattaactatctgcccgtgttttccgtcagggcgtgagtaggggtggaaacgagccaagccgagccaagctcggctcggctcgtgaaagcttggtcaagaacaggctcggctcggctcggcttgataaagagaacgagcaaaaaatgcagctcggcttggctcgtttcaaagctcgagccagctcgagccagcttgtgatgcacaacagcaagtaaatacttcaacaatagtgcaatcaattttcagcaagttaacagcaagtgtgcattacagattctatttactacacaaaacatatggctcgaattaagtatagtatattagtgtaggtataacaattttgatctatttgcctcaacctttctgtgattgaatcattgataatagcacacactgcacacatacacatcaattcatcacgcatatacacatcaattcatcacgcatatacacagctactgagaaatgaatcacaaaaatcagaaaatacatcacgaacctcttcatcctaggctcgtcgctgtgtgaactgtcatcgatcggttggcgtctcggcgaggtgatggacggcgtcgaccgtcgagtcagggacgcgggtagcacaggagagggaggccgaaggcggtgcagggtagagaggcggcgccgcgatggcactggggtcgagcgtcgctgggcggctggggagggaggccggagccagcgcagccgcgcagggcgcaggggagggaggcggctggctggcggaactgaggctgccgcgtcgagcggcgcgccggcgcttctgctagggactgggagggaggcggcgggccagcggccggcaactccttgcgccgcccagagggagggactcggtctcggtgcgatggagtagcggcggcgacgaactgggaagtgggaaggggaatagtttctgtagcaagggaaggttagggttttcattgggcctgggatggggaattgttaatgggccaatgtcattttttcaccagcttgacaagcctaccgagcggcttgcgagctagctcgggctcggctcaatttacaaacgagctctggaggcggctcgggctcggctcgttttcttttcgagccaagccgagctttgcgagctcgagccaagcccgagccgagctcacgagcccgagctttttgtccacccctaggcgtgagagagatgagagtccgagaagctaagcacgcggggaacatccgcatcctgcaacatcgatccgtccgtccgtgtccgtgcccgtgtccaagcggctagcgcgccaggtttgggcagaacgccgtgcgtttttctgttgtttttactactctgcagtcagtactgcttggtcttggagcacggaggagattgccgccttgccgcagacgcacgcggggcccgtcggtagcactggtaatctggtggtatcatatgctgtggcccgagttggaaggtgctcacctgtactgctgtacagagtgtgcgtactgcatcgtatgttctaatgttcaaatgatcaaatctttttttttttttggaacaccattcatgattcatatgatcaaatcttatccctggagaaaaaagttacctcgtaggttggttccaagttccggcaaggtatatgaactgatccagcagaattggaaccataataacattttctatttgactgatttagttgaactgttcaagtaattactcagaattatttcttcttctatgcggggagactctgaattatttcgataagatcgctaaactttattttaactcttgtctcagttttgtctcgcttcttataaaacagcgtaggctgacaacagcagggctcggcccagttatgcaacaagctcaggccagccttagaaggcccacttgattggtaaatggtcctccaccctgaggacctgaaccctgtcgatgctaacccaattcacgggcctcttgtgagcccagccgggcctaacaggttgtccgatccattagctgatgcacacgattgagcaaatctcttccattgaaaaagatcggtttcgacagaaaactgcaaccacatttatcgagtaatttcagtcgaattttttaagccttttctcatactgggcacgtgttgttgcttgcctatggtgtattcacgtgttgttgcttgcctatggtgtattcatatgtttctatctcttttgtatttttcccttactgtcttgatttgtccatagtagagtacagtgtatgtattaaatttacgatgtaattatatgtaatttatagtgtaaaaaaagtactaaccgttttttattgtggtactaaattttagccctaaaagattgagcaagtaaattttagccctaaaagattgagcaatttatttttccctataaaaagatcagacaagtattagtcagtgtattagtttgtccatcccaatctccccacaacggtttttcccattggttgatttattatctaaagagtaacacaaaacatctcaatagtactccagtatacactaccacacgtactcactggtgctaccatatcataaattgatggtattgattccctaaccaacaagaccgtagcgagaagaaacagtacgtgcagtagggtggcaacatccgtgcatgtcatcaaagctaccgatacaatgaaactcccaagtcctacacagaaaccatttgctactcgtgtcttgcttggtgtgaacggcaaacaacagcgagattttgatggcaccgaacgaacgacctcccgtcaacttttactcttcccagcatcgcaattttcacgagcgatgatgcaatccagtacagcgtcacacgatcgatagctaggaggatgtgccttgcaagcgatggaaaagaagcccggaaaacgagctccaaagaggaaaaaagccagccggcttttgtttttcggttttctcgataaagaaaaagtgggtggctttctcttttgggtgtgttgatctctcttttcggttaaattgctgggttctcgccgaactgcacgccaacgcttgaacggcacatctctctcgctcaagatagaaatatcagagaaaggcacgtgccaacattcctcttcttgatggaagttcccagttaaatttgtgagctctgaatctgaatcgatatatgtgatcatcccttttattggatcaatgctattacaaatatgccattttagataaatgtcattactattcacgaaatcggctacgccactagaatttggagaaattggaactgtgccactccgtcgcgttttccgtcagacccctaacgtgggacccacatgccagttccatcttcctccatcctccctcttttatcttccccgcgtgcagatgagactaacggagatttttgatggaaaatgcgacggagtggcatgattccaattttccaaaatttcagtggcacgtagccaatatcgttaacagtagtggcatttatctaatatagcatatttgtagtggcatggagccaattaaaccttttagaaacgggagccattagcgtgaaaatattttgagtttagtgttcccccaagaattaactaagaaataaaatgagtttgccaaggtaattaaaaactaaaatttaaaacaactcggtcttgtagcaagactatatgggatttattattgtcgaagatcgcatgtaatcttctatttttggcgttgtatcctctatatttaatgtccatggattgtatattaagtctcgtaatcacctttcattcatttcaatgtttcccatttttcctaagtcgggtttatatgaaatcggtccgcattgattgtatgagttgagccaatctccctctttatgttctcatgatattagagcgaaattaattccacgtgtttccttctctccttcatctttccgccgcacccatgaagacatcttccattcagcttcccaacggcgacaacgtccactcctcctccccaagatactgcgaaagcctcatcacagcactcgcaaccacctatgttgcggtcgccaccggtatttcggcaaacaagaggatttccttagtgcctaaccaatgagcatgcaactcaagatgccaccactgtatgaagctaggcgcaagcgccatgcatctcctcaaccatgatggtggactgatggtccagctgcccatgccaaacgtgttagccagtgtggcatctacaccctttacctagatggctagcaccctcaactctccaacatcgagaggaaattgcctgttgtcctcgacatgaagagtccaaactacaccaagtgaagggaaatctccctttctttcctcgacaagttttgcctgctacttcatgtgctcgaacttcctcctccaatagatgcaaccggcacagggtgcaagaggacatacccatcctcatcgccttttctactactccatcttccacgatgtccttgacatcaacatggatccaacatatacatttcgtgatctaagggtcactatcaagaacatcttccatgaaaaactgcaaaaacaagatgtcccaattgatggtttcttcaatcaatcggttgtggttattttcacgattgtcataaaagatgttcttggtggcgacccacagatcgcaggtcgtctgtgttggctccatgatcatgtcaaggagtaacgggagatggagtagtagagtacggtgaaaatggtaaagtccaccaggtgttggtggcatcaacaggaggatgagagttgagcacgtgacctagcataccaaactttcctaggaaggcaacaataaagaatatcctccacttggtgtagttcaaactcttcatgtcgaggataacgggtacatgcgtctttacgttgtgatgctgagggcatcgatcgtcaagggagagggtgcatttgccgtgccaatgaacacattcagtatgggcagcggggaccatcaccatggctgaggatatgcctgatgcttgtgcatgtgttgttgccatgatggtatcttaggccgcttgtatgttggctatggtggcgaggagatcctcttgtttgccggcaacgacacaacatgggcgactgcgagcaccatgacaaggttggccacggtgtcttgagaaggaggaggaggagtggcgcctcccacgggaagctgagtggaagagttctccataggtgcaagacgaatgagagaaggaagcaggcaagatcaatcatgctctaataccttgtgaacgtagtgaaagagaaggagattggctcagctcacacacaatcagtgcgggtcgattttaatgaaataactaggcttaggaacatccagaaaacttacaaaggatggaaggtcattaagggacttattatacaacccctacacaccaaatatagaggagacaatgccaaaaatagagtattacatgctatctttgacagaatatgttatctacacattcccctccgatataactttgacgatgactacgataagtaatggtatagatttgatgtacaccatcaattttaccgtgaccctgggggtagagggaagaattggtcatgcaaggaataggagatgattccaagtgtgtgattttataatctaatgtttaagtgtttgtttggcaaatatatcttttggctgcaacttttaattcaaaacatgtgtcttaagtgtcttaagtgaagacaataattttaggttaagtcaatactgttatttttagtgttatcaatatcaagggtaaatactaaaaacaatgaaaacaattaaaacaattcaaaattaggttttaccgttcaattttgtcatatatccaacatgcccctgagatagtttacaataaatagattataatctctcatctgacataaccaatttgaaaatttgataactaaattggggaagcaccagtattgtggtggtgtaatcgtggttgcgagacttcacttactagggtttaaatcatggtgcccacaaatatatacacacttgagtgtgatatcaataggaaatcagcgatgctatggatatgccgttcgtttcttttaacatgtgttatgggacgcacttttgggtgtgcgagcgtggcatgcgtcttcggttaataaaaaaaagtgctgattttgatactttgttttacagtttatgaaaaacaagtactatatataacctgtaggttgatggtcataaataacgggctatgcagattatcaccattattaatgtgttgtctctatttttatacggatactcaaatagtattttaatcaaggtgtgattttatgataagtagtcgttcgacttgcagtctaagaccctgtttagatgggactaaaacttttaagtccctatcagatcgaatgtttatacactaattataaatattaaacgtagactattaataaaagccattcataatcttagactaattcgcgagacgaatctattgaccataattaatctatgattagcctatgtaatgctacagtaaacattctctaatatatggattaattaggcttaaaaaattatctcgcgaattagctttcatttatgtaattagttttgtaagtagtctatatttaatactctaaattagtgtttaaatacatggactaaagttaagtccctgtatccaaacaccacctatgtaataactagtcgtaacttatttaaagggaagataaattctattatccattattaaaaataagtacaggccgaatacaattgaccgagaaattcttttgagaactttatgcacgttataatactccatggataagcattcaagttattaattcgttagcgcaaatggaccttccgcaaacagtatagtatactccgaccagacgaggtatatatatactccactattcaggccaagcatgcgtgatccgttgacctttcggttagagagatcattgacttcacatatcttacgtgcacactcctatacaataacaggagtactggtacgtgttaaactcaatattgttgttttccgcaagccgctctcgacggtgaccgcatggtatgggatccacggtagtagcatggttgcgagtagaagcgccgaatcggcgaagaccccgtcgtccgccctcggcgtctccgtcagcgacttgtcatcgtccacgcggccgagtcggtgtgtacaatgtgtcagtgtagctccacttgcgtgtcttgcggggcatgacatgtggagcggcgggactgctaggtgacgacgaaacgaggaggggaaaaaaaaaaatcaaagttttaaatccgggaatcgccaaacgtttgctacgctcaaatcggtgaccgcttaaatttttggacgagtttgactcagggcctgtttggtttcagggacttatttcaagtccctgtcacatcggatatttagacactaatttagagtattaaacatacactaattacaaaacttattctataaccttggactgattcgcgagacgaatcttttgagtctaattacgccatgattttgacaatgtgatgctacagtaaacttttgataattatggattaattaggcttaaaaaattcgtctcgcggattagctctcatttataaaattagtttttttactaatctatgtttaatactccaaattaacgtccaaacatccgatgtgacatgggctaaaaagttttagccccatctaaacaccccctcaaacaggccgagcctgttttcgcgtgactccgtcgcaggacgacggcccaagagtcagccgggcaggtttcaaatttcgaacgcgaccgcgctcccgaaatgcaaaacgacggagtgaaacgggcatatacagcccgccacgttggacgcagccgcggcacgggagcgacgttgtattcgctaccgtttgggctccagcacgcgcgggaccaactggtcaggagccgaggtagtatcgacgagccgtctcgcgcgtgcgccgtcgtgtgtatcttgcattcttgtctttgcttcgagcgaaaggcgggcggacgcttggccgtttaccgggcgaggacgaggtctcgcctccgagcacgcgactacgcgaggcggcgtggccggcctcttaccgaaactgcccctcgtggagatcggcaaggcggcaaccgcggtttggcccgctcttttcctcgtagcgaacgtggggcggcgctggacttccgtcagggggggcacggggtggcgttttggtaacttcgccatgaggcccacggtcaaatttggcgattccaagtttccaccagttgggcgtcaacgtgtggggctgtattgagctcgacgtagagtaaaaattctggaattccttttttgggtatttctcggctcggttttgccattccgaggataactggcagcgcgctgtctgacggtctctcttttggcgcgggccaaggtttgtttattaatcgcggttaggaggaggagaacaggtgagactcgcgagggaaattttgtcaaggcccgtctttgctgcccacttcacctgctctttcgtagccacatcacaagggaaaaaaataccaaccactaaaagatgatttcgatggtacagtgaacggccttttcaatgataagttcgagctcatttccacctgcagctacaagtgggtaatcatctctttcgtatcgtatcgcgggataacaacttaaaaacaagtttaatattagagttaactttaagcttataagtcatattaaagttagcatgtactagtatatagatgacctataaggttatcttcttttttttttcttttctctatctctcacatatacattcaatgtattcatcttaaaatatgtgaatagctctatgagagccaaccattttcatttttcaaattatgtttcatccatgtaagattataattgacttataccttattattacatttgttcaaatgcttctgcaaacgctatgggtcgtcagccatcaccctattactgcaccgtgatgattgtatttaaacttttctccttaataaaatacttaatcctcttgcatattcgctaaaagttttataatccaattactcgaactgaaattaacactggtggagaaaccatttatactcccggttggtaatctcctttagtcccggttttccaaccgggactagcaatccaggactaaagatgcccatctatctttagtcccggttggtaacatcaatcaggaatctttagttccggttggtaacaccaatcaggaatctttagttccggttggtaacaccaaccgggactaaagagatgatagcggcagtcccactaggtctccttttctttttttttcattgttttttagccagagtttaatccctgtattttctcccaaatcgagtgggatgcatattcccaaatcaaaccccaaatcaaagtaacatcccaaaacattcacatcacaaatcttaagttacttgtacatacaaatcaaatgcatcacagatcttaaaaaaattacacacaaaccaaatacatcacatattatacatctcagatccatacaacaaatcacaaaattatacatctcagtgaatcacaaattgtaaaaaaaaaagaaaaaagaatggatgccgatagcgccgcttgccgccgctcgctactcggcccgtgcgcgggcgcctgccgcgtgcggccccgctgggcacgggaaggtaggagggggaggaggcgttccgggcatcggatgtgaagggaggagggggaggaggaaagggagatggatctgaggagaagagaggccggttgttgaggagattgaggctggttgtgggggagaggaaatggaatatagattatatactacgcgtgattttagcccggttggtaataccaaccgggagtaaagatctaggatatctttagtcctggttggtaaagtggtgatctttagtcccggtttgtgacaccaaccgggactaaagatctctctgacaagggactgacaggttggtgatcgtagaatggctgtggggttttaaaccgggactaaagatgatttttagtgccggttcttttttaaccggaactattgtggttttggggtgaccgagcaaatatcagttttccagtagtgtaagtataccaaataacataattaatttttgctaaccgcaaagccgaatgtaagggtgaaaacggtcggaatcgatagcatctttttggcaacgacactcaatcggtcgataattggccataactatcatttaaactattcagtaatgacattaataccataaaaaaattagaaaaaataaaatttataaatagtcaaaaaagtatggtcagaaacgataactcttatacggaatcttatacggtaacggcgctcgatccatggaaattttcattactgttttcatccgtagcctaacggccctttgcctctggtcatgaggcctgggacctctagaagcgcataataaagagtctcgtacattggaagaactattaaccaaacggccaacatggataaattctcgactcatagtcatagcacgagtctgcttttggaattttggaatgctttcttacgattgtggcttataaatcaaaggtataatcagatatggcgcgactctacgtcgatcttatccttacccctatatggtcctttttgaaattcgttttctaagtttagtcaatcttattttcgcgaaggatggtcgtgtgttgtatgattaatcgtcgtggtgatgtactggggattctttccataaactttgtcattgctatataataaaaatatgagtcttaaaataaaaactctgtgctaaaaggtttaataattttactcttaacaacccataaggtaaagctgaaaaatagaaaaagcaacaatgaaataccccggttgagtttgttcctctgttttcccaactaatatctctcctttttctacacgaacgcttttcaaactgctaaatgatgcattttttttaataaatttctatacgaaagttgtttttttttaaaaaaaaatcttataattcatttttttaaaaaagctaatacttaattaatcacacgctaatggatagtttcgttttacgtgcactgcacattagttgggaaccacaccaggaacaaaaacacagcctaaggctgtgttcgggaggaggggctgggccgcagtccctcctccccggcacgcaaaacgaagctcgtattattgcatgattaattaagtattaacttttttgaaaaatggattagtatgattttttaaaacattgtaaaaatcacaccgtttaacagtttgaaaaacgtgcgcacgaaaacgagagaagtgagttgggaaaactgggagaagaatatagccttaagtcagttccaaaatgaatagacccaccctacatatgtttatgccccattgggaagtaattttgggtgtggcaactttctcattttctattagcatgtttttcgaactactaaaacgatatatttcgtacaaagttttcattataaaagtaaaataaatctattttcaaattataataaccaatacttgactaatcatatgctcactgatgacttatcatgttttagatcaaatttcacaaaactacatgtactttgatcgaattatcgtaaaactacatatttaagacgttgtatcacaaaaagacaaatttaagaccaagcatcacaaaactacatatttaatgctcaaattatcacaaaactatatattttacaagtttaaattcctacaactattattatgttagagttataaatgttgtagttttgtacttaactcggtgcaaaaatgtaattttgtgataattttattactaaacatgtaattttattatactccatcttaaatatgtagttattcgataaacttggttctaaatttatagttttgtgatatatcatcttaaatctgtaatttatgatagtttagacaaagtacatgtagttttgtgaaatttaccccatgttctatgtacctctaatatgtcggacctaacaacccagttgaactgagccgttctgccaaaatgtcactttctcttaaatgcctaaggtatgccaactttgctagaatgatgtcgctaaacttgtttcttaaaatgtcattgcaccatgaatcctccttctcgaaacaacccctaccagacaatacgaagttttgtattgatatagcataaaaaaaaattcaaaattacaatcttgaaagttgcaatcagaaaaaaaacaaaacaatttacatcaccaccactatgaatcctccttcaatcttgctggctggcccagccacaatcagccactttcatgcctctgcccggtaaatgtatgaactttgaaatgataagtcagtacatttcttggatttcacaagagagaagtgatctattccaacagaattcgttgattctcccattcaagatgcctatatccactaccactactactgatatctcaatttccaccggcagcctgacagaactaatgccgattgccggccaaatctggagtagcaatctttgacatgccaaaaatcggttgcttcccagccccgggctacaaccctttttgctgcacgctacgctacgcgagctgctgacgccgcaacggcaacggctaacacacgacgagcccacggccatttcttaaacttgaacttgggtcagtgctattgtagtagggccgtgtttagatcaccctcaactactctaaacttctaacttttcatcatattacatcacatcaaaaacttttctacatatataaacttttaacttttttttcaaactcccaactttcccaaaacttttaacgtttagttcctgaaaaatgttggaagtgtgtttagttcctgaaaaaagttgaaagtttggggaaagttggaagtttagaaaaaaattaaaagtttatgtatgtaggaaagttttggatgatgtggtgtgatggaaagttggaagtttagaggagttagggataaactaaacagtaaacacggccgcagttgcccgcctaaagcaaagcggagttcggactttccgaatccggatttcgggagaagcagcgttgcgtctccatttggagggaaggatccgtgggatgcctgggcccaccacgtgtcatcctccccatgccccgagtgcccgccactaatcacactccccacgccccactaccccgccccgtttatgcctcctcccgactattcaaaataatctcaaaaagaaaaaagaacaatgggcgtcgaataatgcttccctccacacagtgagtgaatctgttccagattcgccccattttcgcaccgtttcttttaaaaagaagcccccaaatgaacggcaaagggtgcatgcaaacgcaagccgtcacatacaggtttcaaattagtggctctcccagtaataatgaaataattaaaagcaaagtcaattttagcattgtatttgtagtagtaaaagtgtgtatttagttcacgctaaaattagaagtttaagtgaaattgaaacgatgtgacggaaaagttggaagtttgtatgtgtagaaaagttttgatgtgatggaaaagttgaaagtttgaagaaagagaaaattccctatatacccctgaaaatttactcaatcccttcaatacccctgaatttgacattatcccttatatacccctgagttttcattttgatctcctctatacccatctccgttagttgaccattagttgaccgttaaatattttaaaatgactatattacccatattatacatatgtgtggtacctacccaataaatcttcatatgaaaaataaacttatacaaaatacaagcaatataatcatttaatgcccaacttaaaaaataaaacttattattttttattttttaaaaattatgattaaatccatacattagtttcaccagaaaattaagagcaaaaactaaatgttatttaggtttaaatttttgggaagatatacgaaattcatcaaatttgatctgaaatttatttaaaaattttaaatttgttttctaatttgtgataaactaattatatcccctttgttttttcacaacgaatcttttttcactaaatatttgttgaaaggtaattttcaaatcttatgcaaaacttttttttacaataaatctttttttattttaatgaaataatgttttattttcaaaaattcataacaaatatttagtaatttattccttattggttttcacaactcaaataatttacacataaaacatttctagcttttaacaatataacaaggacaataaagtaatttctacaataactaacggtcaaactaatggtcaactaacggaatgggtatgtaagggatccaaataaaaactcaggggtatataagagatcaaacaaatttcaggggcgtagaagggattgggtgaaattacatgggcatatagggaattggcccttgaagaaagagggtgtgtttagttccaaagtttttttccaaacttacaactttccatcgcatcaaacatttcatatacacacaactttttcagtcacattgtcttcaatttcaaccaaattctaaactttgggtccaactaaacacagccaaagttagaaactaaaccatgggtgtgtttagttcaagccaaaattaaaagtttgattgaaattggaacgatgtgacggaaaagttggaagtttgtgtgtgtaggaaagtttgatgtgatagaaaagttgaaagtttttttaaaaaagtttggaactaaactaggcccaagtctaggctgtatttacatccaaactttggatccaaacatataactttttctatcacatcaacctatcatacacataatttttcagtcacatcgtaccaatttcaacacaaactttcaactttacgagaaaaacacagccctagtaaaaaagaagtttgttgagttcggcgtaaaaacgggggagatggaggggggcgacggagaaatttaacgaacagtgcatttgttgcgcacacggactttggcagccattcaatgacccaccaggcgctcatcccttccacccctccctctgccttttcccctgcttcccacttcctccacgcctcctcctcctcctcgccttcgctttcctcccacgccgtcgtcgccaccgccgccgccgccatgtcgtcgttcgcgcaccaccaccatggctcgctggtgaggctctctcttgcgtggttgagccgttcgcgacggttttaattagggtggttcttgaaactgacgagagtttcgtgtgtttctttcttttgctctgctttctttgtgcggtttcaggtggagaaggacgggaggatgtccgcgctgaggagtagccttaggccgtacgaggcggccgaggagatggccgcggcggcggccgccggcgggccggcggcggcgtggggggcggtggagaggggggcagggatgatgggggacgggttctcggtggaggacttgctggaccttgaggagctctgtgaggtggacagggacggcggcgagcaaggcgaggcggcggcggcggcggcggccgccgtggagaaggagaggtctagtgactcccatggctcatcggtggtgtcgtatgagcccatgccgctgctgccgccggtgatggacctgccggtaagaacatacatgacgacgttacgtttggctcctcgtttcgcgccaagcgcgtcgacttttgcagtctccacccatgtcgtcgtttgctcatgaggtgtttgtttttgtgtacaggcgcatgacgtggaggagcttgagtgggtgtcccgtatcatggacgactcgctcgccgagctcccgctgccgcagctccccgcggcggcggcggcgttggcggcgtgcggcaagccgcagcaccggcggccgcacgaaggcgcggcgtcggcgttgttggaccctatgcgcaccccgaccatttgcgcgctgtcgacggaggcgctggtgccggtgaagtcgcggcggagcaagcggtcgcgtgcctccgtgtggtcgctctccggcgcgcccctgtccgactcgacgtcgtcgtcgtccaccgcgacaacctcgtcctgctcgtcgtcggcctccttctcgccgttcctccagtacgtggacttccccgcgctagtcgcctccgacctgctcgacgagcagccgcgctccaagaagtccaagcacggcaagaacggcaagcagaagcccaagaagcgcgggcgcaagccgaagcaccagcagccgccgcacctcgccgccgccgccggcggcggcgccgccctccccgccacgggcgaccgccgctgcagccactgcggcgtccagaagacgccccagtggcgcgccggccccgagggcgccaagacgctctgcaacgcctgcggcgtccgctacaagtcgggccgcctcctcccggagtaccggccggcctgcagcccgacgttcgtcagcagcctgcactccaactcccaccgcaaggtgctcgagatgcgccgcaagaaggagacccccgtcatcgtggcggccgccgcgccggccgtcgcctctttctagcctagcctagctagcaccgccgcggtggctgtacattttcctttttcctggccgtatcattagtctgctgtaccgtacctgaactttttcctcccttctctctattttagtcccgtcgtacggctagaattcagtagtaggaaaattagaggtctcatttagagattgtgttaggtttagtgatcaacatttgcatgttttagcattagattgttatagtgtactctagtagaaagcactcgagctcttcacaagaaaagctattcaaagctgcgtctggcaagaatggctgggaggcagaggggtaccgatgtcttcggtgtgaaacaagaaattggctgtcttgttttaaccgaggggtcagaaagaattagagtatctggtgaaagaggaatggggtgtggcttgcctgcatcatcgccatcagctttgtggtgccaaacctatctgtccattactcccagcacatcgagaacattggttctatctatgtcgaggtggtctcctaaagccatctcagccacttcatcagtagtcaacagttcaacaccagtgagactgagactactcgcattccacatttccgctattaaagttcatgtgcataattgattagaccccataggcagtttatcatttatctcttggtctatagtcatataaattagatactcttaattatcatgctctggaaaaaagaaaaagaaaaaggctatccatttgaatattgaaaatgaagagttcatatgagaggctgtgtttagttcgtgtccaaatttttttttgacgtatacggatatatatttgaagtattaaacatagactaataataaaacaaattacagataccgcctgtaaactgtgatacgaatctattaagtttaattaatttgtcattagcaaatgtttactgtagtaccgcattgtcaaatcatggcgtaattaggctcaaaagattcgtctcatgatttacatacaaactgtgtaattgattttttttatcaacatttaatgtttcatgcatatgcccaaacatttgatatgatggaaaagtttgaaaaaaaaattgaatctaaacaaggcctgaatacaacatgctgcaagtggaaattgatactgctctatcaattatacactttagaaaatctccaagttattcagaacaaataaaaaatctgaattatatgaacgattttctgtttaccccattcaaatcaaccggcttaattaaattatattgtctagaaattgagaaaaagtcgcattgaattttattgcaagaacttgagaaagaaaatcgttctcccgtaaataaacactgctaatacggttgaaacaagatactccctccgtcccataatataagggattttggctttttgcttgtactgttcgaccattcgttttattaaaaaaatttggaattatcatttcttttatttgtgacttactttattattcaaagtactttaagcacaaccttttgttttttatgtttgcaaaaattttctaaataagatgaatggtcaaacagtataagtaaaaagtcaaaatcctttatattataagacggagggagtatcagatgaaaaatgtgtaatagccacaggaaaacgaggtttcttttaccatttgttcttatgaacaactcaaaacgagactacatttgaaattagagagcagtgtacaatgaatatgaatattaagtactcattgtacattaggttgttcttattcatatatatcagccagcttcatttctagactacgatgcaacactcttgctggatacacactcttgcagtcgatagtcaaacactattttattcactttggatgccgggttactaataggcttcatgcttaatgcgcctttaagagtgtcatgtctggttcatggtccaagtttgccatgccaatttgaacagtttatttgaatatgttagagtatttctgtgttctagaggagttctcatgcatgtagttaagtactccctccgtactcgcaaaggaagttgttttggatagcgacacggtctccaaaacacaacttcaacttcttatttctataaaaaaatatatatgtatatttttatgaaagtatttttcaagacaaatctattcatataatttttatattttcaaactcaacaacttaagagttattcatgatttatattcccaaggtttaacttaaatattgttctaaacgactttctttataaatacggagggagtattctaattcaaacaaggcgcaatttcaccttgttggctcacttatcatactcttcttttattagccaaagtttgccatacttacccattttacgaggcatgccattcatttactaattgagctatagcaaagctctcttaactcttttctacttttgataactccagactaattaaattaaattatgatagttttcgaatttttttaccaaaaacaattgtgtaaatttcacaaaactacatgtaatttggtgaaattatcgtaaaactatagatttaacatgatatatcacaaaagtacggatttaacactagtgaaatagcgcaaaattatagatttaataacaaagttatcacaaaactacatgtttaatatcaatttaatcataaaattaggacatttactcaaacataacattagtactaagtatttaaactccaaaacattttttttataactttattattaaatacatagttttatgatatttagcttaaacttgtatttttataataaatttattattaaacctgtagttttgtgatcatcatcttgaatatgtagttttacgataatttgcttaaagtatttatagttttgtaaaatttacttaagagtaattcatttgtgtgaaaatttggtactctctccttctcatggttttgtgattctgagataatgcttattcccatctatccactcatgtagtagtatattttcccacctatgaacttctgtactattttatccctcaatttatcacctttaatactatggtattagggtggccgggtgggcaaaagctcgaagctcgtcacttggatcggctcgtataactagcttggctcatactaatagtcttaattattcgagccaagttagatatttaggtcgttagtaaaagagatcatcatgtcttcgcgtacctagtgcttgttaactatcgattagtactttaatttcaggcaaactatatatgtttaattagtgtttattattaggcttatataataaaatagtaaatataaaattataaaagtggtataaatgcattaatgagtcagctcgtgagctgaatcgagataggtttttagctccttagttttaatgagccgttggtttgttattcatccctatgtgacttgttcttttgctacttctttaattttttttaaaagtattataatcttttacattatggaacgagaagagagtagttttttttaaaaaaaagccgccgtggtcttgtgtactgtggatgtggattgaacagatcgatagagtgcttcccaacaaacagtaggcgataaccgcgcccttccggtcttcccgtccaactccacacaggcacacacgacatccgagtttctccctccggtttaacatatacctcggggagaaatctttgatatttcagattcctgcgcgggcaacgctgcccgtgtgtcgtcgactagcaagatttcgcttgccgccgcggccggtcaggtgactcggatttctaaattttgatatcattttcaaccttactaaattttaataaagttaaaaaaataaatacatttagtttgttgtcaaatttttagtaaggtttttttttggcatccaagagaacaggccctaagggttgtttggttgatgtctaagtttgccataactaaactaaggcaagttatggcatgtggcaaaagtatggccaagaagtatttagccataagtgtggcaatgttagctctagttatctgagtatgatatgtgggatctaagggtaaaaaagtgtggcatgacacaactgtggcattaaaacaacacacgcctaaaaactgtggcatgactgaagtgtggcgtggcaaagtgaatcaatcaaccaaacgccccctaaatactccacccaatccgcgtacaacgtgctttggttgcagcagcagcagtagcagcgcagagatgctgctgcttcccggttccccgtcgtcatgtactcatgtggccggcgcttacgtcggcgtgcacgcgtgacggaccgctagaaatttcgaaggcctgtttacggcctaccgcttcctccgttcaaaataataataataataataataataataataataataataataattttagttcttctttaggacagagagagtagttcggagaaatttcacagcaatttggaggaactgcactgttttctacataagttcttaataaaattcctgtgtttctttaaggatcaaatgagggtccctttgaatcgcatggttgaaaaaatggagggatagaaaaaacataagattctgataggaattgaagtgtaaaacagatgattgcaaaacacaggaaaaatataggaatggtcgtttgattagagcgcaggaaaaacgcaggaatcgaatgagagagatagactcaaagggaatttttcaagaggttggagctcttgctaaatttcctccaaaatccacatgcaatatatcattccataggaatttcataggatttggaaagcttcaatcctttgaatcaaagggccaaatagaaaaatttcatataggatttgaatcctatgaaatttctataaaaatcctttgaatcaaaggggccctgaatttcaaaggaattgtcaacgtttggttttctacttttctctggagacttttttttctatgatctttgtttggaacaaaagaaaaaatagatcaaaatcctaagaaaaaagacagaattcttgtattttcaaaggaaaaaaaataaagttcaactcaaatgaaaattttcttcactttggttgttttcttttagaacttccactttggtttgggtttgtatctatctcgctcctaatatatacagtaacatatactgaaaaatgagtcccaccgccgtcgccgtcgccgcagccactccctgccgcctccttgtcgatgccggcgccatctcctgctcggagaggaagagagagagagagatgagagaataatgaggacttgaggagaggagaggaagagagagagagaggggagatgagttgaattttttttgaggtggtgagagggaaaagagagtggctgggagaaaaaaaaatctgtggataaagaggggtatcttttgcataaggaccacttagatttttacatgtgcttatcttaaggagccgtatgcgaaaatgaagattgatttttgcagatgcaactaattacagtttgcatgtaacctataggggtcctcgtacagaaaaatctcttttgtactaatacataagggatcacctatacagtgtaattacatgcaatttacattataattacactataattatactataaatttgtcaaattttaggagaaaatttatcgtaaatgtatagcaaaattaatgcataaatatttgtacctgtgatgagtgtaagatttgaatcttggtgaataggttcgaccacgataagcctaataaattgagctacgtctaattctcaaatttctagtttttcgacttgatcctacgttctatttctgctttttttttcatttcttagttccaaatccattttgattttattgccatttccacgtgttgcttaggtcaagtgggagctccgtgctacgtagtgtgctagctagacactagaaactgagctgtttatccatgaaagcaagccgtgcacaaatttctgcgataatttgctttacctctatcgaaaatacaaaaagaggtggaattgcacatccactccgcgtgtgcgctttctcctgctttgatgtactcttattcctttccccttccgtctttcaccctcctggattcttgcctcctgggctgttttgtgtacactcctctactgaccagcgacggctgcttattgcttcgcttgatcagttgatcctagcaagcagcaactggtaacatgtaccctactcgtccctactacgtactctgaataaaatcagagacggggattccccttccagaaactgaagtacccaaaccggccggtcgggtttgcaaggggcagggggcaaatgcatgcgcgacacctagcgcacactcatcgcgatcatcccgtgaacgacgacacagtcgccgcatgggccgagaagcggggaagaggcacgccgcgcgcgagtgcatgtagctttgcctttggcgtacgtgggcgcgtggcgaggcggcacatgcgccgcggcgggatatggcgcgcgcgttggcgttgcgtttggtgtttgggtggaacaaaccccctgtagtaatagcgaggtggccgtaccgtacgcccaggttgttagctgttactgtacattgctactgctcctagtaatttatcactgagccgtgccactggaaggtggcagtgaatactccatactccatactccatactccatactacagtagtgtaatgccatggcgtccatggccgagtcttttcaaggtttggcgcggtgtgttagtcctcgctttcaattcgttagccttaaagttttcccgtgcaagagtggctccttttccgttactaattggctggaagccatcaactacgacacaagttggtttggctaatggatggctggtgcatgcggcccgcatctatcaaataaaaccagaaattctgggggcggccgagactactccgccaacttgtttagagcccttggagcgaggcacgctttctgttgagtgcaaaacagaacaggcatgcctaacgttagcttttgattacagagctactacgtctactggtttcaattgaaaccggccaatttgataaggtttcatgaccttttgacccaaaagacgtcctaactgaaagctaggaggacaagccatggtactactacgtctacatactatagtagagagtactaaagtactgtactgcataatggtaaaaagaaaactatgaatgaatagtagagttgaacagtatacggatggagtgagtagtttccacgagaaaaggtgcctaagattctctggcttgccatcgagatgataggaacctgctgcctatgggacaggagactggagcgtctcggtttcttgcgtgaaagctacaacaactacttgttcagttgtttgaagatgaaatggaatcgggagattaacaatatcgtacgtcgttgtactccctccgtccaaaaaaaaacaaaccctggttttcatgttcaatatttgaccgtccgtcttatttaaaaaaattatgaaaaaaattaaaaagacaagtcacgcataaaatattaattatattttatcatctaacaacaatttttttttagacggagggagtatacagcaaggtcacttcgctgcttgacccacctcgagttcacggctacgagcctacgactagtcagaacactaacggaatttagaaggaaaccagtattgcaattttattttattttttgctgagcgatcacccaatatatttattttgcaggtttgcagcacaatcaaacacaatcaaactgaagtacgactggaatactagattagtatattgatgcttactagttctgttccggtgatagtatgacagagtacgtgttagtgcctgtttgatcacctctttatagtagtggtaaatagcactatcaaacgagtgcacacaattgactgagttctaaacttcaactctaaactatcactttctcattttttattagcatatttttcgaactactaaatgatatgtttttataaattttccatatagatttttttaaaaataaattattatttaaatatataatagctaatatttaattaatcatgtgttaatgagtaatcctatttatgtggtgctaatatgctactagtacttttatagtactatcttcctcccaaaataaatttaattttcactcattccacagatatagtaataaaaaataccaatactttttatcaaatcctaatacaactatttctcattttatctactttaaatataataattctctactttcataaactctgatataatgtttaatctaaatactataaacttattttatgataaataaaaaaaaagctaaaagcaaacttattacaagacgaagaaagtattaagattcaaatggggatacatgcatgtccattggaccaaacagaaacaaagttggcaatgctcagaaactaagggggtgtttagatggggctaaaactttttagcccatgtcacatcggatgtttggacgctaatttggagtattaaacctagactagtaaaaaaactaatttcataaatgagagctaatctgcaagacgaattttttaagcctaattaatctataattatcaaaagtttactgtagcatcacattgtcaaaatcatggcataattagattcaaaaaattcgtctcgcgaattagtccaaggttatggaatgagttttgtaattagtgtatgtttaatactctaaattagtgtccaaatatccgatgtgacagagacttggaataagtctctagaaaccaaacaggccctaattcatccacaatgtgctgagaaaccaggtaatagacattcaatgctcctctacaacctggtaatagccattgtagaactagtaaataagtagtaccgggtagtatgcttgctaccgatagcaagggaataaataatgttgtttacacaatcgagacagagagtacgggatgaaagcatctttacttatgaatggttgagggttggagaatattttattggtggaccccaccttaaaatctcatacacattgtgctgcctgcatacaactactacctctgacataagaactaacactaatgctcacttcaattttatacattggtgttgctaagtaaaattaaacgacgttgaccaactcatcatatatcaaaatttgtgtttagaacacacgtcagaatcagcgctcttaaacgaagacgtcctatcccgttcgttgcgtgtgatgtctgtcgttcagaatttaggtcaggactcaggaactcgggatgcaggtcggaccttcaattttctactactactcttttctattttttttccaacgttttatcgtccatcttatttaaaatatttttataattagtattttttaattagatgataatatatgaatagtactttatcgattacttatttttattttttattaatattttaaataagatatatggccaaatgttgaacatagaaaactataacttcacttaaaataggatagaggaaatactagtacatgacacatttttctacattctccgtcttaagatgtaagatgttttgattgcatgtgcaaaatactaatactataaatctagataaaaagaagatatgatatctttaatactataaatcgaaataaactccttatccacactattttgggacgaagaaagtactagtacgacaactccatcgaccatatcttataacggaatttgtagtgcaacttggactatgcaaacataaaacaagaagtactactcttgcatactagtggcttcctggctaatatactcccccgtttcaaaatatatactactataggaatttataggttatttagcatgacaaaatttgctacacgacacttaaagtttatgtaatttgcttataaacatagcaaaaatacgttacggctgaaagacctcctaaaaactgttagtttattggagaacactttccgctctattgaagaaagagattcttaaagacgagaatgcccctaggtcctacaagtattttcatcttttctaagaatttatctctccgattgagccgaaagtgttcttgagcaaattatcagttttttaggagtctttgagccgtgacatgtttttacgatgcttatcagtgattacacaaattttgagtgtaatgtagcaaaatttgccatttagcatatattaagatggagaaaaatgagtagctaaggtaagatgaacaaaaattttcataaaaatgattaatggacaaatagtatcgtgagtagcgctagtatttcttattttttttttaacaaaatttaaatactacaattcttatttttgaaacgaatggagtagcactactagaaaatttttcctgacgtgggggtcttattttcacaggcggatatgacccttagagtcaaatgaccacctacaaaaatataactcggggtgaaatttgctacgaaccactcaaacggcgcccgcttaagtggtccgcctgcgaaaatagacttgaatataaatatacttgtgatagctagattttttctaagtctcacacctatcctctctagcggctaccggcggtggcggcgtgtgctcccggcggcggcagcggcgaggagggttgagacggcagcgattcccggcccctccctcccggatctggcctgaggggggcggggggacagcggtggccggcgggtcccagcctctccctcccggatctggccggaggggggcggggggagggcagacatggcgacggcggcgaggggggttgaggcggtggcggcagcggcgaggagggccgaggcggcgcggctctcggccacggcggcgacgggggttgaggcggtggcggcggctcccgacccctccctctcagatctggcagaaggggagcgtggcacgaacgtgcggcggcggcgcggaccggacgtgcggcggcggacgacggcagggcggcggccgtggttttaggaatgattttatttgctttcttgctagaattgatttggtgattttagatgaacttgtgatttctctgttgaatttggattcactcgtttggatggggaataggtgggaactggattgtgaacgggaagctaccgccggaaacgacggtggctgccttttttttagcgctcgaagctattttcgcaggcggacctgttgcacgcctgcgaaaatgtcgttgggccatctggaaaaacactttttctagtagtgtaggtttggaaataggatggaaaatccaaccgtactggctgccatgttcatttttttattgaagccaataatggaaatggaaacaagaacgatgtttattttgccattttgtcggaatttgtatatactcatcttctgtccagctcattagtccatacgcaaagaaagcccgtgagtcctgaaagtatgagtgactaacgtaaccctagagcctcagtcctcacgatcttgccctcgacgcctatcttatcaattattacatacttatctatatttatattactaagataaatagtactatctcccgttctagtatgtactccgtagcaatttaactaggatgagattagattcattttaaaactataaattttaggattaaatagaaagtagtatatattaagatagaatatattactatacataagcaccctgctctccatccgtcagccactcgtccttttttcaatccataaagttgcggcagagtagaacgccggtggtgctagtagctacaatgatggatgtcatcccaaaggatcgcacttgcacctgccttggtcgtaatcatcatttgagttggagaagcggatttgttatcgcaagtgagagttctttttttgtctttcttttttgagccgcgtgctcttttaccctttcccttaaactgcgtactaatagactgaaaaacatactctcaataatgcatcatgtcggaaagataaaagacgggcatggaccacggtaaatttagtctctgaggtgcagacagactgcatctcttttacctggctccctgcctctcgctgctctttcttttgtcgccaacgcactgcgcgcatctcctctgcttcgtttggctacgaatttttgcttctgggcacatgcagcgagagaccctgcttttggtctcttcatgtgttgatttgctcttttgtttctgctatatgttctgttacttctctaggaaacgaactaggagatgcctgggaattgtgatcttctttgtgcccttcagttggaaaaaaaaaggagaggataagctacttataacaggctttgctaatgacgaatttgacatgacggcgacggcaaatcagattccgttactgcctatgcccgtgtctacgtgtgaggcgatgagcttttaggcgagtataaaatctccacgacattcgtacgtggcgtcaatcagatcagtaatttcaataggagcacttggaaaggcttaaattgcttaatcatactaccaccaaggaaaaagaaggcgagattctgaaacgtttaatatgtggctctaattcattctatagagtgttgacacttagccattttctggctatcacgcaacagtttgattgcctgcacagtcacctggggccggccaatcaatctggcccacatgtattctttggatatcattattgctcaataagtacacctgaccaatctaatcttgttccatatggcaacgctggaaagaacaagtgaaatatcgtccagtcgtatgcttagtttagaattgtttttttccccatggattcaacgaagaggtcaacgagataagaactaaattttggtgtggtagcgttatatcacctactccaaaatttagcatgtgatttggcctttgcatgaacggtgagccatggctgatgtatgttaactgtgaaggtatgggtgcgtgcagtgaatggcaagcgccgctcttgctatgcacaaccgcacaatttatggtcttcagactgcacactacagagcaggacctagctttgaggaagacatatcatctgcaagactgaagcagtaccaatactactgcttcacttaatcacatcaactgatgttcattagaaggcacgggaacgcgaccaagcgagggggggttaaacagtggattaattgcacccactgcacgaatagtaatcagtttcacatctctatcagtgggtgttggctggctgatggccgatgccgatgccagcgagtgaatgagagggtcaactaccatcagtctgtgcagggtagctcacctgcaccaggtgaggtcactctccctgggcgtctcgcaaacgtggacaaaggtcaaacttctactagctgcatgcaagtctgcagactgtagtcgttgcctgttgaaaatttttgtacttctcatttacgtgcaaccttcttcctcgttgcacaggtcagaagacaataatgggtgcggatagctacaatatctccatgggctacgaacctacgatgcgacccatcctgtgggatctcaattagggcctgttatgtaacagcgagcgcttcttcacactccaaaggaataagtccactttgcctccctcaactcttgcgcctggttgaatcgcatccctcaaccacaaaattgggtataacccgtcccctaacttccaaaatcgttacaaatcgactccctcggcggtttcggaggtggtttcgtcctatgtggcccttacgtggcaagttgacttggactttatcccatatggcatcgacatggcactaaaataaaaacaaacctaaatgggactcacatgtcagttagtaaaataataaaataaattttgggcccatgtgttaattaccttactcctccctctttatccctgacagcgagcgagatggagagagatgcgcgagcatagagggagcgacggagcggcagggacggcggcgcggtgggagcacagcgggagcggtaggacagcgggaggcggtggggcggtgggagaggctgggcatcgggagtttggcgggagaggcgggagcggcgggggtggcgggatcttggtgggagcggccggactacgagagctcggcagagcggcaagagctcgcaggagcggagagagagagagagagagagagaggagaggggaagaaacctcgccgcctcatccccattctcgcctcgttggcctcgccgccgcctcttcttctccctctcgccgtcgcctcccttcccgcgcccctcctctgttgcctcatccccatcctctcgtcctcctacacgcagactggcatcccgacgaagacggcctcacctgacatgtttgtcacagcctcgacggcggtggcagggtcacctccctcatccggcgtgcctccgtcgtgccgagcagcggctggtagtgtcgtcacctcacctcgcccagcgcacggatgcggtcgtggaccacgcgtcactgttccgacgcggacagagttggaatgcctccgccgcgacctcccagctccggtgtcctgcatccggcattcggtgcttgtctcgctgccgccacgagcccacgagggatggaatagaggatagaggaagagcagagtcactgacaggtgggatccacaagccgacttagctagtcagcataggtcggatgaaaccgccagcgaaaccaccaagggaggtgatttgccatggttttcaaagctgaaggaggtattataccctgtttttcggttgagggacgtgattcaaccaaggataagatctgagggaggcaaaatagacttattcccactccaaagtaagtaaatagggcccacatcgttgggcttagacttctaaaatagcttagactagattgaaattttaacattctggccctttcacaaaacttatctattctttctataaaattaaagcccattaagtccaaagcttaacatgcaaccataccacatcatcacccactaacaataactacatatttaatctcatgcaagcatacaacatgatgtacaatttatttaattctataaatcaaaacgcaagcatatccaatcatcatctctcatatcatttccacaatattttaacaaatctatctatcacttttacaatatttaacatatacttatcgatatgtttcatagcaaagcgcggggaatcacctagttctataaatgaaccatgacaaaaactataactaaaaagtaggtctctaccatttaccactacactacacaagctttcacgtgtattttagcctattatttttttataatgtatttcacggttcagtgccaatgggcctagtgaccacatgttgggccccaacgccaaggtctatggcattgaggtaaatatctatttctggttataattcttgtcaagcactagctatggaataagtttagtaaaagatcaaaatgtcaaaattacggtagactataggggtaggaagttggagaacctgacttccacatggatgggccatatttcggcccatcggaagaaggctttgatatcagacgtatcatatgggccatggcccatggggttgtggctatggactaccagcacataccttgaagtgacagattggcccaaaaacgttggcccgatggcgtcagcttcctactgtttcttctccgtggtgagagtttgtgtgttggtaagcatatataccatctcttttggctccatctcaaaacgagaaacataaataaatctctggagactgtgtgataccaaacctggacggagcagccggccctgccaccaattgtccaatttgccgttgagaattcgtaagtacgcaggccatctcgcgcgcgcaactcgtgcgacgttatttttttaaaacaaaagcaattctacggttcttgaggaggtatcatgaggtaccaaaattttggtacctcatgatacctcatactacctaggtaccatgaggtaccaaattttcaatagaaaaaatagtatttcatggtaccttctaaaggaccgtaaaattgctctaaaacaaatgatgcatgacttaagcttctatcagaggtgcacttttgatgaatccgcaacttgtgtgtagttaggttgccgctattttctttaagccgcacattggtgtagactccagagaataataatcctaccggacgcgatggagatcgcaagatatcataagaaaatcgcgatgatcaggagcaacaggacaaatgttaacttttgtgatcgattccgtgtccgctgagcacatgccgcgatctcaaagcaaagattctgctctcatcaataattcttgcttgcgatgtgtatatagcattgtttactacgtgattaaaactgcagcttcctcgaaagaaaaaaagaaacatggtttcaggatactaattctgaatttgtgacgggaaagagtatgccctagctcgtgcaattacctcctataattgtacttgattgagctgattcctcagtagagcacgcaaagcagagaggaccaaacgatcgttgtccctcgcaagctgcaaacagttaatatttttatgcttttcagctcgtgacgattcgatgcaatctcggcaatttgaggtataaacaaatcatggggcttcttcatcaactctagcatatctctcatcaataaagttccagagtccagagcgtttgtggagccaggaatggttggctgcgtgtgccaagttgctcttgccttatcagcagcaaagtgcaacgcatgcccatgcttggctgaaaagtgcagcacatgaaaacaacgccctttaaagccgtatgcacatcttgccctttgactcgcttgggcagtgcctttcctcttcaatgtgtgttcttatttgcaaagctttgtggctgagtttgttcttccggtacctttcttcacaactaatcagacatgtttggcatcacgatcaaaagggactgcatgcccgctgtccagttcatgttatttgtggataaatatgttcacgaaatgctaccttttcacctaagctgaaaatactactgcatcatcatccaacttcgatcgtttaattaacatgatcattatattggtcacagatttagtaggtttgagactgcttagctcaattcttcttccatggttatgacttatgaatagggtaaatggcgaaacttagatagtttcatatgctattattgtggattaaccataccatagcactactgctgcggtcacgcatattaattcgacctgttcaagtagacaagtatatatagacgagcagccaccacaccccagtttcttggagtcgttttctgcccatttcctttttatcccaagaaaatggaaagcagtggagtggcatcaattcccttgtacctgtgcaaaagttggatgcattgaagatgttgacaccgtgttggccttgaaagccatgtttccggcttacacaaaccagttgcatacatagtcaagctatggccgcacaaattgtaaaatagaacgataaaaggaaaatagatttgtgagctttttccacagatttcaatgtcttgatgtggggatgtcaagctggggataggatatattatttgttccaaaagctcaaaagtgcttagccaccaagtacacagtaatacatgttggtaccagcagttgtaatatcaactcaatttatttaaaattattgcaaattgatcaaagcaagtagcaaaattcaatatatttgtgtatttgttatagttattaatccaacacatgccacttggacatttacgccaagttggaccgccccatcacggtctattatttatttttttccaagaagggtcccatgatccccctcccccttcctcatgcatagagggtaaaaagttcgtaagcacgtttgtcgattataatctagctatatcttgtaaagagatttgaatatgaaacttttagttggtttttttttcctgtttatagtccgctaagactaagtattgcaatttttttctactatattaacatgaaacttcatactctcttgaatgggtcgtgttaaaaaaagagattcacaaacatacttaatcaatatttataaatgatttcactaacaatagtcgatctatgacttgatggagtctgtccaattcatgccaagtatcagctgaaatgaacttataaaaaatttgttactgagaaataatagcccttaacctttggagtctactaaattatatgatcttattgtttagcctatacatgataatctttgcttaatgtgaaattcttaatctcacttataacctgcttgaaatgtcatcggtcttgacattgatttatgttcttcctttgtttcttccttttcttcttccttcaattttcatcttctctttctttcaccatcgacggttcccgagatcgcctcatgaatctcttccaatgctcagatcgatctggcaattagggttagggtttagtatagagagttcggtgtccctctcttctttgtgttaacttctatttataggcgttggtggtgctcaggggttatctccaattaggtaaaaagttagtttaattttaccgaccacaaaattaaccttatctctctttttaagaacggataggtgtatgtatcccttccctaaccaaccgacatttagtcgatacaatcaaccaatattaccaatctccaaagtcattaccattagtgctacaacgatttatcaccaactaaaaggacaatagagtaactgtggcctcgacaataggctccgtggtaatgactatatgatattattgtaacctctcctggtttccttcgcatacttgaagaaaaaaaacatgaataaataatggatccaccattatttcttaaaaaatattgtccacttgagttatcccaacactccaacgacctgcaacttaacactaagatcatatgtttaactattccctttaattataggtcaaaacaaacctggaaagagatggtgttgctgtatgccagcaccgtcaattgtatgacaaattaatggcgaagacaaggaaaacaactaataaaatatgaagtgaaaagctcaattgtattggttacgatggacctcatggacatggatggaactcttcagatgtagccaaagttgtcgacaaagtggcttaactagaattgtaaaatctgtgtttgaactcaggttgcaaagctcctctcctttaatccaaagtttaggttttgagacaaggtcttctaaggatgtagcaatgaatgaatttacaactcaactagtaccacccgacttcacatcatgcatgagctttctatcatattgggtacaaataagttattctcctcatgttctatcagatactcgtctttcggttgtcatactaattaccctcccccccccctgacgcatgtagggaaggaggtactaaagatatatcttgacccaataattaaaaatgagtgtggggtctaatctaatctattatattattaaaacaattttggaaggagggggctagaaattcccatgttaatcggagaaaaagaaaaggagagtccaagtagaaatacaatttaaaaatagttgaaattcgaaattaaaaataagcaatattgaaagaagtttctatataagaacccaatacgagattaatcaaaattccaaatattatattattaaaacaacactgaaaggaaacaccacgtttgttgtgggggctagaaattcccacatcaatcggaggaaaagaaaatgagagtccaagtagaaatacaatttaaaaatagcctaaattcggaattaaaaataagcaatattgaaagaaatttccatataagaacccaatacgatattgatcaaaagttgaatattatattattaaaaccactttaaaaggagcaccacgctcgctgtggggggctagaaattcccacattaatcagagaaaaagaaaaggagagtccaagtagaaatacaatttaaaaatagcagaaatttagtgttaaaaataggaaaatattgaaagaagtttccatataagaacccaatataagattaatcaaaattcaaaataaaaataaaataaaatccaaaattagaaaaaaaggagagttcaagtaggaatacaatttgaaaataactgaaattcggaattaaaaataagtaatattgaaagaagagtccatatataagaacccaagacgagattaattaaaatttgaaatagatataaaaataaaatccaaaattagcaaaaataaaaataaaataaaataaaagaagaattcaagtaggaatacgatttaaaattagctagaattcgaaatttaaaataaacaatattgaaaaaagaatccatgtaagaatccaatacgagattaattaaaattcggaataaaaaaataatatccaaaattagaaaattaaaagagaggtcaagtaggaatacaattttgaaacaactgaaattgaaaataaaaaaaattaaaataacacatacggtattaactaaaatttgaaaaaaaaataaattctgaaattagaaaaataaaaataagatttgaattaggaatacaatttataaataactaaaatttgtgataaaaataaagactattgaaagaaaagaccatctaaaacacttgacgagataaattaagtaacaagtctataaaagagtagagtagcggcggttgatacgacatataaaaattgttaataaaacaccaaataaaatcctaatgacgattaaaaggagggacgacaggcagaccgtgaagcaaacgggcaaggcggttgccggaacttctataaagtaaaaaaataaaccccattgataatcatattcgatttttaaaatctcaatgataataaaaaggagaaacagcgggcggggtgtataggagtatagttgcagagccgcctatggttggcgggacttctagaaaataaaaaatgaattccaacaatagttatgttcgatttttagaatcccaatgacaatatagagtaggcggtggataggccgtagaggagcatagtggcatcgtttgatgggacttctaaaatttataaaaaatgaaacccaacaagacaataaactctaaaaactataaggtccaatttttaatggttcgaaaattctaaaaagtaaaaaaaaacaatgataatcatgttcaattttaaaatctcaatgacaataaagaagggaggcagtgggcgagccgtagaggagtacaatggcaaagccgctgacggtttggcgggacttctagaaagtaaaaatgaacccaaatggtaattatgttcgatttttaaaatcccaatgacaataaagagaagagacagtggatgggcagtagaggagtataatggcaacgtttgacgggacgaaattaaaaacacaacgtgacaataaagtctaaaaattataatatccaatttttaaaggtttcaagagaatgaatagaaatagtggtagatcaagcaagcaaataaagaatgagatgacataagtaaggggtagcaactgatatgacttttaaaaactatataattagaaacacgaggatgataaggctcggtcttttaaagtctaaactcaaagtaaaatcatactaaaaaaatatatttttgtttgggtgctagccgtgcaattgtgcgagctacccagctagttaaccattacaaggttaaggagcgtcttttctatatcgagaacacataatactaacttagggtgtgtttagttctttgggtgtaaagtttttgaagtatacggacgcacatttgagtattaaatgtagactaataacaaaacaaattacagattctgcctgtaaactgctagatggatttttaagcctaattaatccgtcattagcaaatgtttactgtagcatcacattatgaaatcatggcgtaattaggcttaaaagattcgtctcgcaatttacatgcaaactgtgcaattgttttttttcttttccccacatttaataccccatacatgtgtctaagcatttgatgtaacgtttttagttaaaattttttgggatccaaacaaggccttaattagcccgctcctcatgtataactatcttatgatccaacttcaagcaacctagactatcccacggtaaacagctatcatatccaggagcagctccatccggaattgtacagcggattctatagggattcataccaatctcacctggcttccctgaaacgtggcgcaattgacccgcatgtcgcaacctctagtctccagccgtaagtcctcctggaaaccagataattaattcttttttttaacgactcgcaagagacggtgcgaagttctattgatagagcaattacaagattacaaccatagaaggttgtaaccaggaaaaaggaaaaagaaaaccaccacccacacaccgacagcgccaacacacaagtccgggagaagattatcaccggaccggctgccgctaagcgtgacggaccgccgctagaccaacaaaggaatacagacgagatcgctcccgaggggatgccaaacgtcttcaagaagagaagcgacggaaaaaccgccaccgccgtccgtcgaggctcaaaggagccaagactgggcttacgcacggcaaccacggcaacgccctcaggagggggaatgaaccatcgatgtcggtccggccaaggccgggctaggttttcacccgctgctcaccacctgcgaatccacgactgacgctccgatgctccaccaccgctcaagctctgccgacatgtgggacccctgcaccagcggcccccgccggccagccttcgtgtgtcgaagaccgcgccacacccaccggcagctcttcctcacaccgaggtcgcctcctccaccgccggtcgcgcctctcgcgccaagccggcctcctccaccggacgcgcctctcgcgccagtccggcctccctccatcggccgcacctctcgcgccaagccggcctccatctctgccgcccgcgcctctctacgccaagccgatctccgacccctcctccaaataatgccgcgccggccagttgcagccgtctgccatgctctcggctagccgtccgaggccgtcatgcctccggtgaccgcagatatggtcaccgccaccgcagccgttgctgccgaacgcccaaccacctcaccgtcgccatcctcaaatactcgacctcctccgccgttgccaccgatccaccaccgtgctgtcgccgccgaccagccgccactgccaccatcaccacgagctccgcgccgttgccaccatcgccatcgcgcccttgccgccgacgccgcaaactccgcagcgctagcactgccgcgaggtcgccccgcaccagatccgccctccggggggctggatccgcctccggcgcgaccgggtcctgcccgccgtctccctcctcgccgcccccttccatccccgccgccatctccatccccgccgccgctggcctgcactccgccgcctccaccaccattcgccaccgccaccgcccctcagccccgcccgccgtcacctcgtccgcctcttccgcctgtgccgcaaccacctccgcgggcatcacggcctcctccaccggcagctcgatgctggcgtcacggcctcctccaccggcagctcgacctccttcgctggcctttgaaacgacgcggccggcgccgctccctcccgaactgaccacgcgggggccagatccgcctccactggcgttggatccgtcgcctccggccgccggcggcctcgaagacccccgcctccgtccctccgtccgttccccttcggagctccatccgacaggtagaggcgcgagagagaaagaaggccccgctgccgccgtccttgccgccgcccagctttgccggcggctgctcgggcggcggcgaggcagagaaggcgagggaggggggctggcggtggtggctggcgtcgccgcccgagtcgccctggagcgaggcgacacgggcgaaccttcggcaaaccagataattaatcgaccagagatcatcgatccaccttgaaaagtccctcaccgtcctacaaggccgcgcgagttgacctgcagctgtgagcctgtgagagcaggtataataacaagctataaggtagctataaacatattttaaaaagataaaaaaaaagagagaagagcagcgtgctacatatcagtagtcagctgcagcacagactctaagatgtaacgtgcgtatgatatgtgagactagatattaatagtatagtaagtaactattatatgaattggctattatattggttatagatgatttagatctagtattgggctatactattaaacttttctctggaccgggagtccgggagacgtacgagccgcagaaaaggcgcgcgaaaacggtgcccaatctcgtagtcgccgcggctgcctacgcacacgtacgccatgtgggcgcggcgcgagaggccgaagccgagacgcgcgcccgtgcttgcttcccggctcgcgcgcgagcgccgtgccgtttcccccgcggagcaagggcgcgtcgtcgtggcgggattggggattttttttggggggcaaaaagcggaggcggatgcggccaaaactggcctttttggtctacctttttccatcgcgtgtgcccccgtggcggcgaacgcgaatccccggccgcgattcggtggatcccccctgccccaagcccaagcagctgcagcgcggcctccgctggcttccatgatgggaaagcgcccgcattattttagcaagggcagtagggcacactcgccagctgcctgcctgtaatctcactctcgatcgagtggaccaatctctattattgttgccctctacgtactcgtttttgcttctgcgccacgaactccactgctttggattcgtcgccaacatgttcacgaaggaacacggaacacgttgaatctgttcgccccagcaaaaaaaaaaaaaaaggaaaaaaaacagacaacacgttgaatctgcaaatgagttgaaaaggagagagagcaggaaagtccccatattttgctacaaatctagttacccatgattaacaaatctctactattataaaaactagctgggtggcccgcacaattgcgcggctagcacccaaacaaaatcatatatttttttaaatatgattttacttaaaatttattaaatagctatttattgtcttaagactttaaaagaccaaaccttatcattctcgtgtttctaactatataggttttaaaagtcacaccagttgctaccccttacgtcatcttcttttttatttgcttgctcgatctaccactatttctattcatttttcttggaacctttaaaaattggattttatagtttttagagttattgtcacgatgggtttcgtttttataatttatagatgtcccgtcaaacgttgccattatactcctctacggcccgtccactgtttcttctctttattgtcattgagattttaaaaatcgaacataattatcgttcgggttcatttttactttctagaagtccggctaaaccatcagcggctttgccattatactcctctacggctcgcccgctgcctcccttctttattgtcattaagattttaaaatcgaacatgattatcattgggtttttttactttttggaaatcccgaacctttaaaaattggacttgcattttattttttataatttttagaagtcccatcaaacgatgccactatacccctctacaactcgtccgtcacccactctttattatcattgtgattctaaaaatcgaacataactattgttggaattcattttttattttctagaagtcccatcaaccgtcggcggctctgcttctcctttttattgtcattgagattttaaaaatcaaatatgattatcaatagggtttatttttttactttctagaagtcccagcaactgtcttacttgtttgcttcacggcctgcttgacgtccctctttttaatcgtcattaggattctatttggtgttttattaacaatttttatatgtcgtacgaaccaccaccactctactcctttatagacctgtttcttaatttatctcgtcatgtgttttagatggtcttttctttcaatagtctttatttttatcacaaattttagttatttataaattgtattcctaattgaaatattatttttctttttctaatttcagagtttatttttttttaaaaaaaattagttaataccgtattgtgttattttaatatttttattttttattttcaatttcagttgtttcaaaattgtatttctacttgaactctcttttaatttttctaattttggatattattttattttttattcaaaattttaattaatttcatattgggttcttatatggattcttctttcaatattgcttatttttaattttgaatttcatctaattttaaattgtattcctaattaacccttcttttattttctttttctaattttggatttatttttatttttatttcgaattttaattagtctcgtattgggttcttatatggattcttcttttaatattatttatttttaattccgaaattctgctatttttaaattgtattcctacttggactctccttttcttttctaattttggattttattttatttttattttaaattttgattaatcttgtattgggttcttatatggaaacttctttcaatattacttatttttaattccgaatttcagctatttttaaattgcattcctacttgactctcctttccttttctaattttggatttttttattttaattttgaattttgattaatctcgtattgggttcttatatggaaacttctttcaatattgcttatttttaattccgaatgtcagctatttttaaattgtattcctacttggactcttctttccttttctaattttggattttattttatttttatttcaaattttgattaatctcgtattaggttcttataaggaaacttctttcaatattgcttatttttaattccgaatttcagctatttttagattgtattcctacttggactctccttttcttttttttttctccgattaatgtgggaatttctagcctccacagcgaacgtggtgcctcattttcgagctgtcttaattatataatagattaaagttgtttccgcggttcgtcatctgtgtttgagtcggttataaaaactgaagatattttcgtggttcgtcatctgtgtttgagtcggttttaattttatgttttggttttaactatatctcttctctatctctatctctactattataaaaactgaagatgttatgccggtattttgatacgtcatccgtgtatgagtcggtttttaaattcgtttgtttttggaaatacatatccatatttgagtcggtttttaagatcgttcacttttgataatagaaaggaatcatataagaaatctgtataaaaaactcgcatgctaacttgagacgattggactcctaactgtaactcatgattttctatatatatatatatatccaagcgaactcccactgtaaattttatcttaactaaaccatataacaataataaaataaaaataaacttcacccgttgcaacgcatgggtatttttttcgagtaacagtaaaatatatctattatactcgtataggacaagcttcttataataactttagaaaattcatatacttcttgcttttgatttaaaacggttaaaacgtgaatctgtcgggtaaatagttagccgtctgtacaacgtcatggatttaaattctgtgtgtcaagggcagtacagaccgaacgaatatgagcgatagattttttgtatcatttcatttagcatgcagggccacatttttcatgccagcagagcatcccatcgcagacacagttgttgcatgttaggcaacgtacgcggcctatagggcttgtctgctaatgcatctctctacacatgctacgatataccagccgataaaaaagaggtctcgtgtcgtactacagcatggcacaaaatatatgactaataaatccatgtttgataagctatatctttttcagcggtaaaccacccacagactctgtaagctgttttgatggttttggctcgatcattggctgccatgcatgcatctaggagatctggtgccggaggagtgaactgaattgaggtagtagcagctaacatggtaataacatatagaataatggtggttgatgataatgcaccgaaggaagaattgcaagtggaaaggaagaaagagagatatcaagttggagtttggcctttattacgtgtttgctgatggcgcccatgctgcaatgcgcttggcctctgaccccatcacctctgcccatttcatgcccatcacctacttccaatcccacgagagagtttcctctcagaggaatattggaaaagataagcataaatctgaaaagctacgaatttcatattcgtggctctctgcgttacagttctcgcccaaaggattagacagataataatacgcgcgcggagcaaacacttaactagtgcatgcttttggctagtaacaccagaatctcaggttaattacatcacgcgttgttctatgaagatacaattagccatctcgtccacggctggcagctactaggtcgcactcatacagaggatgataggttatctaatcgcagataattgcagagaaactgtgatcttttgatgacggtcaacactcaacaccagagccatcaccaataacaggagatgaccgcatcccccgtcagaacagcagataatgaagaaaaagtcagctcggctccccttttcaacccacagtactatccacgtccgtactatcaaaaacgtcgcgaaagccacccgaactcgggcacacgcaaacgcacacgcaaaaaaaaagcgtagatcgaaaggcgtcgaagagaaggacaccgcgccttcgcgccccggccggataacgcgccgtgcggtgccatgcaaattgcgaggtctctcccccgtaaagtcacacgtgacaccgtgacaagcacacccttcgcctcagcacacctcacccacgcgagcgagacgctgcgcctaacacgtcaggtcggcaaggtcaccgaccggctgaccccgccctcctcgcgacctcggctgtggcatggcctctcgccgcggcgcttgactcatcacgatttcgcttaattaatttggatttggatgcggatccctcgcctcctcgcaatttagcaacgtgatcggctgacttaacggcccatgcttaacgcacaagccgcctcgcgctctctctgtctcttcggcggcagtgtatatataaagcgcgcgcgcagctagcccccacacatatcttttgtacacgggcgtactacgtgttacggctgaaccaatctatccccgtgctcgctgtgaggccattgaccagaggaaacggaggaggagagagcgatcgtggtcgtacgtacgttgggagagaagaagggacgcgcgcgcgcgcgccggagcggcagggcaggatgaaggtgcagtgcgacgtgtgcgcggccgaggcggcgtcggtgttctgctgcgccgacgaggccgcgctgtgcgacgcgtgcgaccaccgggtgcaccgggccaacaagctcgccgggaagcaccgccggttctcgctgctcaacccctcggcgtccggccgctcgccgacatcgacgacggcgccgctctgcgacatctgccaggtgagacaagagaagcaaacgatcgccttcgatctggatacagagggggttattagggtgtggtagtagctgatcaattttggttgtctcgtgatgcaggagaagaggggtttcctgttctgcaaggaggaccgggcgatcctgtgccgcgagtgcgacgtgccggtgcacacggcgagcgagctcaccatgcgccacagccggtacctcctcaccggcgtgcggctctcctcggagcctgccgcgtccccggcgccgccgtcggaggaggagaacagcagcagcttctgctgcagcgccgacgacgccgtgccggccccggcggcgcccgccacgagccacggcgggagcagcggcagcagcagcatctccgagtacctcaccacgctgcccgggtggcacgtcgaggacttcctcgtcgacgacgccactgccgaggccgccgccgccgccgccgccacctcttccggcatctccgcgaacgggccgtgtcaggttggtgccactgatcgaccatagaaatgtcgcacagtactagctatcgtcaatataatcttgaatggtccaacagctaaccatctttggcacgatcctgcatcgatcgatcgagcacactagcacatatcccgttcatgtctgcatcgacattactacatccagtccagcaattccattatggggggtagcttgtagttatgctcgcagcttgcactatggtccacgctgtatcgataatatcttcttggggggaccacttagatggatcattttggacacgagcaaaaatatttagtactccttgctctcccgaacacaactaaaatcgtaaaatgcatcgccatttaatttggagctactgctgtgggatctcgtgactgatatggctctgtacgtttggacagggggtaacacggatcggagggctgcaagaatccgccggctaccctgcgtggatggcgcagcagcagctgtgctgcgacggcctcgtcgccggcgacgcgtcgccggctagccgggagcggtgggtgccgcagatgtacgcggatcagcttgccgccggcagcaagagatccaggacgtccactgcttcttcctactcctactggtgaaactaaagcaattgaggccatggtttgtacgtagtagatgttgtttcgggcttaattaatgactgcattttgcgcttccggacgggagtgtttgtgcgttatttttgaggcgcagaggaaaatctgagccttttgtatcccttcctttttgctcgtcacgactagtactgtatgtttttcttctacgcaataacgagaatttttcctcttttccaatgtaagaacctggttatctgggattgtttggacttttggatgtggttgagacgttcagttccggtgggtctaatcgattggaaccgggggcgaaggggtcaaccggagtagagcttagtacatgtgccataaatatgttgcaaagcagagagctatcacctcgttggttttcattgatgccgtttacacaggcaattgtcaatgctaagcatagagttcagaaataccggtgcaccacctcgggtgtattagatcgtgacagctacatgcttggtggttgggccaagtttacaagacatcaaggcccatcttgccacccccataagcttgcggaataagtttatttcaggtcactcatcttaacgtcagtttaatttatatcctcgaaaccaaaaccatgtatagcatgtctcttaacttccaataccatatgctacttaaaatcctataacaatattatgtccgattttaactattgtgacgagttgattgtagtcaagccatgtgagccccacatgttagggagaggagcctaactggcattcccttcttcctcctccacttctctctttatctctctctctctctcacacacacacatcttctctcttcgtcggcggatttatcgagagggagcagctgagggaggggcagagctcacgatatcagcatgctcgttgctcctccggccgcttcgagcttggtgacgccgatgctggcacgccgccaccgccagtctctcctctcctaccggtcgatggctttatccatgccgcacgtcgcgcttctactcgtcggtcgccgccctggagaagatgggggaatagagggagagaggaggaagaacagtggcccgcggacatgtggggtccacgtgaatcctatgttgactcaacctggttgaccatagttaactcatcacgttagccaaaaccagacacaatgttattttgggttctagggtatttcagtattgaaagttgagggacacgttatatctgatattatatctaggtaatataaaagttttttttatagggaaggtaatatgaaagtttatagaacatattgtagttctttgtttaatacacaccttgagtgtgtgccaggtgacgtgaaaccaactaatttcaaaaggaaaccacatgaggaaaatatcattcatatcgctcaacaattattgcttttggcaaacaatggacctcgggcgccatatgaaatctactggtcactaccagcatttgcagagagagggaccggcgggaggagcgctaggaccttggtttagttggtggctgattagagtcactaataacgaaaatttatttatttttgataaacacaatataagcgtagatgcccataacgtacgcacactcacccccttccctatgagcacattcggactcccgctgttgacggttaacgtcactcaccactaaaataatattaattagctgtaaataagaacactagtgtttgtctagtatttgaatccgagtagactgattctaccgtaagaaatataacgagttaaactacactgtacactcccatttgtaatttactatggagttgtttgacctttcataaaaaaaaagctcccaatacaatacttcctccgtttcatattataagactttctagcattatactccctctgtccccataatataagggattttgagtttttgtttgtattttttgatcacttgtcttattcaaaaaatttgtgtaaatataaaaaacgaaaagttgtgcttaaagtattttggataataaagtaagtaaaaaaattaaataataattctaaatttttttgaataagacgagtgttcaaacaatgcaagtaaaaactcaaattccattatattataagacggaggaagtagatgttaatgaatctagacatatgtataaatgtgggcaatgctaataaatagtgatccggaaacccaatgggcccaagcatatgatgttattgtcgaaagaagtgggccgttgcccgcaatttagcacccgaaaagcagcagacacagaagcgagcgaaaccaccacggaaagatctccccagtccacacgtcgaaatcgatcgaaatcgagggggccggagatggctgcggcgagagcagcggtccccatcgccgtcttcctcctcctcgtcctcgccgaggccgaccccgcggcggcgacgcgctcgccttcggccttcgtgcagaacgccatctactccaatcgcatcaccatcttctctaaaacctactgcccgtaagccctccaggacgcccctttacacggctcctttcacctgtttttctggttggattttgggggaatttttcagggatgtgcgtgtgcttgatggtgaggagtggcaggagtagatgccgcagcgaggagatctccgggaatagagaacgggttcatataccgtgaattagggtggatttgttgtgcagtagatggtgtagtgcgaattaggaagatttgccctgcaattggaacccagattgttgagaaatagcttaatttaagttaaattgagcttgtgaactgtggtcggatagttttatttgacggaatttgaacattttgtttgcttagaactgaaaatagttaccaaactgtccatatacgagtagtttttattcaaactgttgaatagatccagctatgccttggtttgctagatttaactctatgatgtagtatagtccccactacaccccctctgggcagtacaaagccctggtgaattttgtggaatgtatttcaggtaagttctctttacatttttttggaagatctttacatatttctgtcgagtctttaaaacaaaataaaatggtttgacctactgatacaatagagaagtcttaatacagagggggtatcctactcgaattgctgtctgcgtactgcacattgtgcttctgtaacatatggtctaagataacctataggttgagattatcctactggagtactaggagcggcaatagtggactcataaagtatcttgtactattgtaccatgtggttaaactagttagtaccctcaaatcaactggcattaattggtttgtttcttgggtagcaacgggttgtttttaatggagtagtaaacaatctgtgtctacacatttgtccacacacacatgctattataatgcttgcatatttgtatcactcctaaggtgtattacagatttacagttgggctataatccaccaattagaagaatgtggtgtccatgtgtttatatgcagtgtacatgtgttaccctagcatattaatttgtaacatggttccttcctattattgaagcaaaccatctggtgggataaaaaattgtgaagttcgtttttgggatatatatgtgtgttttaatataacaaaattaaaagacatttaactgtgactgtacaaagtgaatacaaggatgcagttcattgttgaaatttgcatgattgtatttgtataccaaattaaggatgaattctgaatcacaagaaaccaaggagtcgaagactgagtggttgaattactagatcttttgttctccttgaaatatcctaaacacttcttatatggcacgactaatgaattctcctgtaactgtaccactcctgacatcttcttctcaaatgcctctttactcttgttcttctaggtactctatgcgtgctaagcgtatatttagagatctcaaggagaatccttatattgttgaactagatctcagaggtaatcatcttggtctcatggagcctgaatcaaatttcaattcattcatttgacagcttgaagttaatagtactctatacatgctatgcagaggatggtagagaaattcaaagtgttcttctagacttagttggccgtcatactgtgccacaggtgttcgtgaatggccagcacgttggtggctcagatggttagtgttttatgctgcactgttgtttctatgtaagcatgtacacttccataaatatcaacaatctgcttgctgaatattacagatacagcaaatgctcattctaatggacagcttcagaaacttcttggaaatagccaatcacagcgatgatctgtagttaagactatcaaatactcgtgtatggctaacatgtgtgagaagaagggggccgtcttttctctttacacaggatccttaacagaatgttgcagcttcagcagttttttttgcatggaagtgttgtgacaacgatttctatgtttgtgattcatctgtcaagcgcatattctattaactgctgtgccggctctgtactgtttgtgactttgtgtttataagttattaattccccttgtatttacaatgactatcaataataggtagtgcggctatggtttgtgtaagtacttgaatttagttgacttttggtgatgaattttgaatctgaaacagaactcctgtaaacatgtctcaaaacgtcatgaaaagttgaaaactataaaaactgccttgcaaactcattaacaccctcatcttttcgcttatgcttatgattatcatccaaaatttaaattttcaaccataaatctaaagttaattttaaggttttttttcatcgaagtttatttttcagcttttacttttagatcgttgaaacacatatataaaagttttattcataaattatttctcgtttgtaaacatgtgaataagccaaatgatggcaccctaaaacggaaggggatcccctgacattgtgtagtttacaattgtgccactattgctgaaacctgaattcaagatttgacacctgattgcctccttctggtggtgccaataaaacgcgtgggactggaaaaatcgtgacagagcacatgaatcggaatgtattggatgatcaaactgtttgatacaatattgcaatgcactaacaggtagttatattttttgagtttatttagtaactgcaagcacgtttcttggaaataaatacataaatatcacataaaatagtgtccccggcatgtgcattggccgcatggcacgacgatcacacattttatgaaccaacactgcagacgattgatcgatccttcatcgccttatgccgagcagccaaaaggcgagcagcgcaagcacgagcgagacgtagtcgaacctgaagacgcggcgcaacatccccatcttgtactcgtcccaaggcgggtatctgaacatgaactcgaccaggaggctcctcctgaccaccgccttcctgtggctgaacagctcgaacgtgtacttgccgtggtactgcccgaacccgctctccccgatcccgccgaacgggacgctgtccagcccgtactgcatgcacagattgcagcgacatatcagaaaaaaaaagggcatcacattttttttttaagttttgagtaaatttcacaaaaccatatatactttaaattagctggatggccctctgcaattgcacggatagacggatagcacccatatgaaattatgtacttaaagtattcctatcaaaaactcttctccaatttcaaatatctattcctttattccaatactcctcctttgaaccaatacccaaaataaaagtcactttaaacttccatttccaaaaataaaccaaaactcccacatgcatagagtctatgaactacatgtattttattcaaatacccctcctttaacccaataccccaaaataaaagtccctttaaacttccattcccacatgcatagattccatgaactatatgttaaaatttatctccaaatcccaaatagtctccaaacaaattcttttgaattacatctccttcgttttaactacatctctttttagattctattaaaataatccccttcaaaaattcagaaaactcttccatttcttttggaccgaaatccttccaaccggtcatctccctcctgggctaattccatcaccttcctgtttgggtccttccggtcttttctccctaacacggcccagccaggccgtggcccagctgagccaaccgcctccttccttccagagggcgcgtcgtgcgcacgccgctgttgatgcaaaaaacaaatttggtcgttaacagccgccactgccctaccggagtgatctccgcctcccctatagcgtatctcgccgtaccatctcaccactagcattttcccactccggcgaatccattttccccatttcctcctctcccacctcacatcaagccacctcagagttttctctctcctgccggactaagttcttgtcatcggcattcccaactcttccctcactccccatgccggttgccgcattcctccattgtgttgtgttcgggattgcgttgaggcgccaccgttaagccactggacgcgccgacgtcgtacgccttctcctcctctgcctgcttggcctgaagccctaaaccgaggaaaaagaagaggaacagacatagccgggcatgcagacgtcgccattgctttgtccgatcgtgtgcaaactcggacgatggaccaaaaatcgcatgtgatgattagaaagatataattttttaagtagttaagatttcatattttaaattccaaattctagtcatttttaaattgtactcctatatggactaaactcctcttccaatattccttatttttaatttttaatatttctaattgtatttttatatgaactgtaaactcatctttcattattctttatttttttaatttcaaatttcagttatttgtaaattgtattcctatatggactctagacacttcttctaatattcattttcttaatttggaattttagttatttgtaaattgtatttatatatggactctaaattctacttttaaacttattattttttattccaatttttaattaattctaaattcctatatggactctagattcttcttccaatcttccttattatttataaattgtattttcatatggaatctaaacttatcttttaatattccttatttttatttttaattttagttatttctaaattgtatttctatatgaacctcatatagacgcttcttccaatatttattattttttaaaatttataattttatttctatatggactctaatatctactttaaattttcttattttttaattttgaatttctgttaattctaaattatataccggtatggactctagtctactcttcactattccttattttaattctgaatttcagctattttttaaattgtatttctatatggactctattttgaatttataggttgtgagacttaccatggaggcttttttattattttaataacttaatagatttggctaaaatatatgtagttttatgaaattacctctttagattttactgcaggacactgtgaaagattttatctctaacaaagcatgagtgcgcatctcgtctcgttgtgttcttttacctgcacaatcgcgtcgttgaacaagacgctcccggaggacgtttctgcgacgatccgctgtttcaacttctcgttgttggtgaaggcgtagatggcaagcggtttgggcttcgatttcaagaacgcgatgcaatcctctgttttctttacctgcaaacaagagcggcgtttgttgtttccgccagatgcgtgggttgtgcttggttcaatcaagaattgccgctatctttgtcgactcgtaccgttatgattgggagcagtggcccgaatatctcctccatcatgatgtcggagtcgaacggtggattcagcacgatggtgggctcgatccacctgcacagttagaatcacggcatgatacaccgaaattccgtgtatacgattggctaggaatgcaaaaggttggagttaataatttacagtgtcttggggtcagcgttgccgccgtgcacaatggaggatttcacttgatcatcctctagaaggtttgtcaacctatggaaatgcttctcgttcaggatgcgcgccatgtactctggttcggtaaagaacctcttgagtgtagatttaagcagttcaatcttcagagatatgacacatacaccagaaacgacatttgttagaaggataatttactatatatccttgataacgtacaagaaggtaccacattttctaatgtaaaatttagtacttgtaagtactaaatagtttgagctaccaaattctcaaggtctataaaatttctctagttagaaatgtggtacaaaactcatctggcgaaatggcactagaatcaaacgaaaatttcagagtgaaaccagaccaggaatggtgcaaactgttcctcgacaagtatgtaatcgatggcaacgcaagcttgtcctgcacaagtagaccatttcgctccgattatccgattcacggcgacctgtgcgaccaaggcatcatcagataagctcactcttgcccttccaccttccaaccaggcattgtatctcagaactgaaaactggtgaagaacagatcgaacgctatacctgacactccctcttactgtcaaggcagtcaacgatgcacgggcatttcgagccaagctcaagcgcgaccggcgtcaggtgtttcgctgctttcgtcataatgatgcgccctacacgagcattccctgaaaaacaaaatgaccatcataataaatacagtcaataacgacgaattgaagtttcagaaccaagttgagtttggcacagtgtacgtcatgcatttaccggtgaaaaggaccttgtcccatctgtgctccatgagctcctctcctacctccgccccgccctgtacgaccttcacggcattggcgtccagatacttcggtatgttggcggcgaggaacgcggcggttgacggtgcaaactcggagggcttcagaacaacggcgttgccggccgctatggccccggagagtggctctagagctaagcctgtggacgtacggcatgccatgaaaaaggtgagcactgagccacagaccatgcaaactaccacgcaattgacaagagtgtttggttatgtgaattatggtcatggacatggtgccgagataatctgaagttcaccctatcgtcttatttgtaacatataggcccatttgtcatctactcggagtgtcaaatcagcgaagccctaatgtttgcagtcctaatattgcaattttctccttttatttgggagcttaagattccgagatctgctggttggtagccagcttctaagaatctagagaagctgagttttctagtttctgggtactagtttattttctggaatccacaactacagattctgagaatctgggtgacaatctgtactgtttgggggtgctggagattctgggagaagctgcggcagccagaagcacccccaaacaggccctaagattctcaagaaacagttggttggtagccaacttttgacttgatactataactatagattataagaatctacactgtttactaaagttagacatactgagagaaactacgaccgctagaattccttaaatatggcatatatatcttttcatttgaatgaccagtccatgaacatggtgttataaattggtgcatttctttctattgagttgcacgcacaagttaggttaacctaaaagcttaagttcatagaggaagatggacagtactctgatgctgacaactgtacgtaggaatgcatttttggatgtattggcgctcaaaaggttaaggcaatataatgagtatgttcatgatctctgcagtgacggacgtgatcaattcagcaaccaaccaccgtgagaccgatggaacttgctgcattaacttgcaaggcttcattgcataagacgatcgaaaattaatatatatgttaccatcgggcagctatgagactaactcacgattacgatctaataacacacaggtctcgtctctgaaggcaattattaagcatgtgggccgttttattttcgtaatcgagaaaagaagatcacggtcctcgatcgagtaacctttttaaagttaagtttccattgtgaacttcaaaactgtaacaaattgcgatccatgctattcttcttaagatgtttttgggttatgtacttatatggttaaaaggaaagatcttttagacaaagaggacaaaaatactctgttcgttttatattataagacgttttgattttctcaagtcaaattttgttaagtgtgattaaatttatagaaaaatatagtaacattttcaacataaaaacatataatcaaaatatgttcaatgttattttaataaaactaattttgtgttacaaatatttctaaacttttctataaatctgcttgaatgtacttaaaaagtttgactaagaaaaaaaataaatcaacttatattatgaagcggagggagtacgtcgcatctctatcgctgtctcaccgttaattagataccgatatgtagaagttgtcacaccatattaaatcactcttcaccggaaaatcctgtttaaaattaatttggtgcggtggtgaagtcatagatgcattacttgattcgatatgattcaaatattaactgtgcgtttgtgtgcctcttcagttggtgtggagatcaattgaagttatattttcattgtcaagaaaaagagtctggtatatggatcaggaaaaaatgatttgctctgcaactaatagacttcctttatgaaaaacagccaagccgaccatgatgaatggagcaaaatggtttcacctattgggagattccagcatgagaaaatgagcacaaccccgattggttccggcacgacccgagcgttgcatggaaatgaaataagcggcacatcaacctgcacccacaaaacccccaactatccagtcagagtacgtaacaaatgaattaatgtgccggccttaattttgcagaagcttatattgcacctgctggagactatacatctcttctccgttttcttgccataaggaatatgcttgcttgactatcatttttcaaagtacatattcatgaaagaacattaaattacagcattataaatctagctagtaatggtcgatactaattactccctctatataactatcaaaagtagattgagggattactatttttacttattttctgtttaaagttttaaaattttgactgccgcatattttaacggagccatcattttgcttattcgcggaataagcgaaacggcatatttgaaaataaaaggtaatttgtaaataaaatttttatatacgtgttcttagcgatatgaaaacaaaggctgaaaaataagcttcgatgaaaaacctcaaaatcagctccaaatttaagcttaaaaattcaaattttgactgataagcatgagcataagcgaaaaggccctaacacacggtgcaggatttaagtaggtgcagttcttgccttctcgggcgaagcccatttcttgaggttttgcagcgtgttcctgacggacttggcaagaaccccaacctgtggacgagcaattaattaatatacataaaccagagcataaaccgaatgaacagagatcatcagctaatttaacaagcgtttgtcagttgccacggcgagcgatcgaggtcacctcgtctcggaaggactcgacgcggtgcttgccgaggtcgtcgtggagcgcgtcgaagatggcgtcctcctcctccgtgatcatcctgatgaggcccccgagctgcgccttcctccactccagctccttggtcctcccgctctcgtactcctccctcacgccggccaccaagccgcccaagctgccgtgctgcggcttctcctccatgtgtggatcgccgcaggcaagcagctagcttgtggccggggatgcgatacgttaaaatgcgattgattatctggtggcttcttaatttatagcagagtgatcgtgaagaataggaggacccggtgccacaagacccccatattcgactagagatataaagtggttaaggtacatgtattatgtattatatagtaaagtagaactcaataataatatacaatttttagatagggataaggttttaactgttatcaaggaggttggaacctgtctaaattcttatctcccgcattcatatattttaggtctcgatcgttacccttcttattattaccgatttttcaggaacacccagtgatcttctaaggtggtaggttagccggtttaaattcgaaacctcataccttatatttatttaatgttagatagttctctaatattcacttttttttattattacctatttctagtgattcgagggtagaatcggtagatacagtagttcatcaatggagctgagctggaacagggttagcattaattcagtcatttaagcgtgttgtactgtgcgtagcaaataaggtggaacagggattcagttgggataatctaacgtgcgacgagcaaagcaggtatatgcgtgaactccaagctgctttacgtgtacacaaggcacgtgaaagaaaaatatgcacgtcatagaatccattgagggttcccgtgtcgctccctccagggtgacatgggaggcgacatcacaggccacccctgcccccactttcctcctctccgcctgagcagccgccggcaaagccgaacgacggtgaggacggcaatggcgtgccttctcccttcgtgcaaggtttggcggctagggcatcaaccggtcattgagcggaggggtggcagacaaccgagacgactgggttcagcgccgccgaggccggtcgaagtggatccgacaccgctggagatggatctagccctctcgtggccaaattggggggggggggggggttggcagcgctgaccgcgcatcgtcaagtaggaggaggaggccgtggcgagggggagttgaggaaggccccgcggcatgaagagccacgatgacgggacgcctggggggaagactaggtcgctaggaggaggaaggtcaacggtggtggagaggcaggtggcgggggaagaagcttgcatggcaacgggctggatccgggccctcccacgccagatcccgctgggagcgacgaagaggtcaccgcggccgatggctgtggacaagaggatgacggcggcgaggctggctcggtcggtggcggtaagaggccacgggtacagagagctggcacggacaatgctccgggtgaccagtggtggcatgaggagacgggcgcgaggcgacagtgatgtgggcgggcggcttgaggcgggggtgccgtgggtcatctggatgaggtggcggcgatggtggtatcgtgaggttggtgcaggagacctgtgacaggccctgatccagacacttgtcctcttgcgacagcgccttgtcgtcacaagatggccacgtcgatggccgacgaggcgttggcgcggtggctatgcgtcgatcatgtacgagtggtgggctactgttccagcaaacgattttgactcgggagggtagaaagtttatgggcgaaagcctagccttcgggccaacaacggcatcttcgggtgccgctttccccttggggggtgttgtgtgatctcctctgctcaccttaatgatttttttcagggggggaaactttgtcctggcttcccaagacggggagtggcggcactttcaagtgttattcccttcttgaaggtgttgtctagaagttcctctccttaggcctagttcgatctcctaatttggagatagattttggttgcacataatacaaaaaaaaaacctcgttaacatatgattaatgaagtattaactattataaatttaaaaaatgaatttatttgcttttttaaacaacttttatatagattttttttaaaaaacacaccatttaacagtttaaaaagtatgctaacaaaaaatgagaaagttgaagtttagagttggagatagaacatggccttaggggtgtcgtgtccgtttgccctcagtagcgagacgccgagatctggttgtagacacgaggtgtgtttttttcttggaaaaatttgctacaggacacagaaagattgtggcctttgctgtgagacatccgaagatcgtgtatttgctcgtggacactataaaaaagtggtaattagctggcggacaccggccacattattttattatttccggtcaaaacggagagagaaactttggttaaagacaagtttacccatggacccactcgtcaatctttctttctctgttcatcttcttcatcttctctctttctcattgtgctgccgccgagctccgtcgtggccgagccgtcgtgcgtcgccactgtcggtggtgaaccccggcgatgcgccattgccgagccggctcgggccggccccgttggccgcgcgcgtcgcgcctatgctctgctgcgaggaggaacatgtaccaacagctcgctgcacggcgtcgcctcggggtcctgcagcgccaccgggttaggcgaccacgatcggtgcttctccgcgaacgccgggcaccccagcgccgcgttccactgtgcgcgcgaatgcggcgcgccatgaactgctccggcagccgcgtctcgattttgtccagggtcataagcacgagcacggaacggtcgaggtaataaggtctgtgaggaggcggagaaagtggagaagtcgacgagggagatgaggagcacggcggcgaggaggcccgcagcgacggccggcgtgaggaggtaggcgcggttgaggcgttgagcatgacggagtacgccaggatgagcgacgcaagcgagcgccccgaggccggtggcactagcgacgacatcgtcgtcactggatcgtcccgctcactacaactgggccactgatgccgtcgagcctaccaactactagagcatattattcaagtcccaacggttcagaaccagccgtccatgcagcacatgaaaaatttctcatgcacggacgcgatgggtaggagagagagaggaagccgtgcgtcgttgccgttggcggtgaaccccgacgatgcgccgcggccgccgccccgccgtggccgtgccatcctggctcgggccggccgccgtcacgcccctgctccgctgcgaggaagaagaggatagaaaagaagagagagagagagagggaaagacgtgcgtcgggatgtcgtcgtgtgtcgttgccgtcggcggtgaaccatgcgctgccgctgctgcctcgccgtggcggagccgtcccggctcgggccggccgccgtagcgcatctgactccactgcgaggaagaagaaggggaaaagaaaagaagagagagaggaagaatagtgtccaggggtattttggtacttacacaactctttctctctccattttaaccggacataataaaataatggaaggagtgtccatcagctaattaccatttttttcagtgtccacgagtaaatacactatctttgggtgtctcacaacaaatgctacaatcttttagtgtctggtagtaaatttttatcttttttttctttttctagctataatcttttatgattataaatattaattataaaaaatttttaaataagacagaaattgagcgtagaaatgtccttaaaatggaacggaggaattaatagtccgaggagcatcttcgtctctggaaaagtatggcaaagtatggcagtgacgtgtgggggagatagacgtagctttggtccatgtttatgaaaaggaggcaatctcattcggagagatgaccttgcaacggcaatcagtgacccttaagagatgaccttgcaacggcttcaataataatttcaatcagtgacccttaaaagtgattgaaatttaattcatgatcctaaaccatacaaccggatatcttgacccccaaactcttaaaatcggtacaatttaactccctaggcggttttagagggcggttttgttgacgcggcgtctacgtggcggtattgaccgggtctcctttacacgtggtgttgaggtgacatttacaattttaaaatatgtgtgggacccatttgtcagtgacacattaaaaaatcgtgggacccacgtgtcccttctccctcctcgccgctccctctctctctccctctctcctgctgcgggcagtgagggccggagcggcggcgggcggagacggtggcgagcggcggagacgcgggcgtggctcggcggcctgctagtgtgagcgacagagacacgggagtggcggcggcggcggcgcccggcctgagctccaccgcctcctcgccgacggcgaccagtcgttcgagcaggaggacggcggcgagcggcacacgcggcgggcttgacgacgacgacgtcctccaccgtcaccgccgccgctcatgtcgacgcggtccaagtcggtgacccaccgtcaaatgcttgctcgtcgcgtggagaacctcttcgtcccgggtcatgtgtgtgtgaattgctcgtgttgctccactcctctgtctgctcctcgtttataacagctggagtgttggtggctctggctgcgtcgacgtgcgcagggcgttgggttttgctacgacgaagaaggcgtaagcacacccgtgcgcgcggtttcgttcgcgatggtggcgaagaagccgagggttgtggtggtgggcgcggggatatcgtgcctcacggcggcgcaccggctgtgcggcgcgggcggggacaagttcgaggtggcggtggtggaggccggtgaccgagtcgactgccggatcctcacgtccgagttcgccggccaccgagtcgagatgggcgccacgtgggtgcagggcgtcgtcgggagccccgtgtacgcgctggcgcgcgacgccggcgcgatcggggaggagggtggtggtctcccgtacgagcgcatggacggcttccccgaccgcgtgctgaccgtcgcagagggcggcgaggtcgtcgacgcggacacggtggctggcccgatcgaggagctgtacaggggcatgatagaggccgcgcgcgacggcgaggctggtggtggaggcggcgtggaggagtacctgcgccgtggcctacgggcgtaccaggcggcgcggtctgccggcggcggcggcaaggaacttgaggaagtggaggaggcgctgctcgccatgcacatcaacctggagcggaccgacacctccgccgacgacctcgacctcaccaccgagggcgagtaccgcgacttccccaacccagagcaagcatttgttgtgtcactgacaaatgggtcccacatataatttaaaattctaaatgctacctcaacaccacgtgtaaagaagatccgattttatggtttagaatcacggattagatttcgatcacttttgagggtcaataagggtcaataagtgaacttattcctaataattaataggttggccagtgattagacgaaagcggcgcgcgcgcattcggagttgggcctccgcgtggtaggctcatccgcgcagatcgctaattggcccaaggattccttacatcttcaactagataagtttagaattgttttatcttgaaccatcctctaagcacatgtttccctactattttcttctctatcgagaagcggatacagcagcaggtaggcttaaagggctccctcaaacagtctagcttttagcttttagttcagattctgagaaactgtagttgtagaattcagaaaataaactagattcttaaaagctggttaccaactagctgcttattaaaattttaagctctccaaaacaggccctcattaggctctggcctatcctccattttttgcaatttttttaatagcagagctatcagccatggcagagcaggagcactagctggtggggaagatgaacaggagaaagaaggctgaagcctgaatctgtatgcagatgagcccaatagatactcgagttgaccacctagggctcagtgggctggtccatctcttgtccctttgtccatctggctagggttggtataaggaaaaagtacaccgaaggtccctcaacttgtcttcttacaaaatcgtccttaaaccacaaaccagatacaatgcatcttccaacttataaaaccagtgcaaactagttttctcgacggttttgactccggttttacctgtcgtggcagctctctcagcatggggcccacgtgggccccaacccgtcagcctcttcttccccctcctctctccacctctcttcatctctcctccccttcttggcgaccggcagcagagaggagctgggcgcggcaggtgaagatgggtggccgcccgacggagaggagctggacgcggaaggccggtgcggtgggcgtgggcggcagccggcgggagaggagctgggcggtggcgctcaggcagcggcatcaccgagctcgaccggccgtccccatcccccatcctcgacgatggtgcatggggagaagggccggctggtcggtgcgcgcggccatgggcggcgtcatcaacgagctcgaccggccacccgatagagaggagctggaggcggatggccggtgcggcgggcacgggcggcggagtaggtgctggcaggccgattctcctggatcaacctccgcagccgattctccggcgtcataggatggcttgcagcaacaatgttcgctccccttataagaccagtaggtgggattgctctcactactcgaccggactgcacaagcatctccaatgctgcacaagcaaaaatctgtggcagcgttgacaaggccatggccatgtacgacgacgtctcgagcggcggcaccgcctactgctcactaggatcgacaagccacgctgcaacaggatctaccagcaccagctccgaccgccgaccgacgccgcccatcgagcctgcctcctctccattgtgctcccccctgccggccgtcgaaggctgcgctagccctccttccccgccagccgccggcgtgcccaccgtgccggcacccctcctgtgctggcgtgctcctcgaggggagaagagagagagaggggaaaggagaggagggagagagagagggtggtgttgacgtcgtcacctgacaaagtggggccatatgggtcccacgccgactaagccaccacgtcagataaaactagagtcaaaaccaccaaaggatataaagtgaacggttttataagttaagggatgtcgtatatctggtttcatggttggggaatgattctgtaactcgatgacaagttaagggaccttcggtgtactttttccatggtaataatgaggaataagtttatctgaggtcccttaacttgtcgacgaatccgatttttgtccctcaaccggaaaaccagatacaacgagtccttcaactgtcaaaaacagtgcagatgaggtcccccagcggtttggacagcggttttggctgacgtgacgcctacgtggctaatttgactcggtcttcatctgacgtggcgttgacgtggcaattcgatctggaaaaaatattaaaactcatgggacccacatgtcagtttcaaacacaaattaataaaaaacggtggggcccacatgggccccacgtgtcattctacccctcatcttcttcctcctcttcatctctctacaagcaccatccgcttggatatcacgtggcgcggccatccccaccaccaaccatggagatctctgccgccgcgcccccctccaggccgccgccgctcctcctcctccgcccgctcgcctcctcctcgcccgtcccccgtcaccgccacctcctcctccatcaccatcaaccgccgccgcccttccacctcagccaccgccaccgtccgccgccgcgcgcgcacccgcccccgcacccgccgatccaagcctcccttcgacacgggcggcccttctccggggacgacgacgacggcttctttggcccgggtggtggaggaggatgaggagggggcgggggtggaaccgcgggtcgaggtcaggggctggatgggaggactcgttgggcgagccggacattcccgcgccgcggaggtcggcggcggaggcggcgctcggggtggtgtacgagctcatgtgcctcatcgcgctctccaactgcacccagttcaccgtgcggaggctcgcggacctcctcactgcgcgtcgtcgtcttccggtgcgcaacggcgtgaagtcggcggggcgggcgggcagagcggcggcgcgaagccgacggggcggagtggggcggcggcgggcggacgcgcaggcggagtggcggcggcaatccggccgggcggagtagcggcaatccaccggcggcacccccaactccctccgccggcatcgtcgcacctcctccaccgatctccactctcgccacggcgtcgccttccatctccggatctgagcgccgcctgggccatctccgaggctcttctcccgacggccaccgtgcaccgccccttctccccgccctccgtcaaccgtcgcgcttggacagagatgaagagggaagatggggagagaggaggaagaagaggaggggtagaatgacatgtgggccccactattttttattaatttgtgtgtgaaactgacatgtgggtcccatagggtttaatattttttctggaccaaattaccacatcggcgccacgtcaatgccacgtcggatgaagaccgagtcaaattagccacgtaggcgccacgtcagccaaaaccgtcgtccaaactatcgagggaccttatttgcactggttttgacagttgagggacccattgtatctggttttctggttgaagcatgaaaattggattcgttgacaaggtaagggacctaagatgaacttattcctaataacgaggactcctccagctcgcgggcggcatgcggctgaggccggctttgcactggctgagaatcagacagccgggtgggccgccatgactagctagggcttgtgacgcgggctgtgtttagttaacatcaaaattagaagtttggttaaaattaaaattatgtgacgaaaaaattgaaagtttgtgtgtaagaaagtttttgatgtgatagaaaagttgaaagtttgaagaattattttggaactaaacacggcggcagttgcgccattggggctctgacctgctgtttctactctagcactctcgtactcaactagtgtgctatctgctatatagtaccatacgactatgagtcatactattatgatgttctcaataattatacgagttcacaagactgagatttagaaatagagtcttatccatacgtttcgtttttttttctattgctagatatttcgttttttttattgatagatgtttcgttttttttctattggtagatggagtaatgatctatcgtagatttgcagtggagagaaaaaaacccacattgctcactttaccagcaattcaataatacccctccaactagtgggagcacaaatcaactcaagagattacgagtagttcatccaaataaaaatattgctaatccagcacaacaaatatcaaatgcgaattatactcattaaatctgacttatatttgatcacgtatatatgcgtatgcgagcacggtgttggcagaagaggaactcgagcttgagtaggcgccggtgcatgtagtggtcgagctagagcttaacacctatggagcttttgagctttgagtttgggacttggggacaaggacggagctcaaacgggggacgaatcgtcggcaaatgaagccggcatctagataggctcgactatgtcccctcagatgttcctctctcaagctcaagctcgacctcactggaggaaattgaggtaaaagacgagggacaacaagggtttccagccttccaggtgaaaggtgatctcgcactcccaaattcggtggatcatgacaatgtgaaattgggtagctcgagattaatgagaaggggtgggacctcagagattctgcgtcagctacggaatccccgcaaatgctaattcgcgcgctgccggcacacaaggcccacgtgcacgcgcgattttttttcgacgctatttctttttttttttgctttttcttttttttcgtagctgccgttatttcttttttttttcgccgttgactaccgtactcgtgtaggagtaggattcaagatttgaaactttcaactcaaaatttttttgatatttttaactcagatttgaaaacttttaagtcaagatttaaaaacttttcactcggatataaaaacttacaatttgaacttgaaaacgtttaactcggatttaaaaactttcaactcggacttgaaaacttttaacttggattcaaaaactttcaaatgaagattgaaactttcaattcaaatttaaaaaacttcaagtcaagatttgaaaacttaactcaggtttgaaaactattaactcatatttaataatctgagttgaaaattttttaaatctaagttgaaagtatttaaatcttgacttgaaatttttaaatctgagttcagatctgaaatttaaagtttgtttcagtcaacttaggaaaaaaagaaagacgcgtgatgaatttttaataaaaaaaatgaaaacggaaaaaaaaagttagcgctgagcgcttttagcgtcaacaaaacgcgccacgtctcctcctagcgcgtacgtgcgcgttaggagcatcttgctggatgagcagcgtgagcacgacggccgctgtatatgccgatgtcacgtgaggagagaaaggagatgaacgtagtgaggatgaacactcgagtcattgacgtgtgagatcactagtccaaagtacaaagagtttaattactaggaataatccggccaataataagtaggtataaataagggcggatccagaaaaaataaattgaagggactcaattacacggtttcttcaacctacagccatttagaaacatttagtttatcatttatggtgaaaaaattgaaagggtgctccgatagatatccatgggtcttgtgggtgtaggggggactcgagtcccctccgcacccacattagatccgcccctgggtataaatagtgcaagagaaaaggtgaggaactttgtaaactcactgttcaaaagagttagcacatttccacattattacatttattatttcctttcgaaatatcgaaagtaaacacacaccggaattaaagtcgttatctatctacagacacttagtacgtactcccttcgtcaaaaaaaaagtaaactctgaatttttcatgtccaactttaactgtccgtcttatatgaaaactttttataattcgtatttttattgttgttagatgataaaacatgattaatattttatgcgtgacttgtatttttaattttttttataaattttttaaataaaacggaaaactctttttatgggacgggacggagtgagtattaaagaaagaacacaatatttcacggaaagcacttgggacacgtggcgttgcttttctgcggggccccacggcagaaggagaactggtgtggacactttggcaagcaattgtccgccaaactcaccaccgcgccgtcctccttcagctgcctcagctggctcggcagggccccacagagaaagttcccctgcagcatgagcctgacaaatgggacccacttgtccgtgggcccgtccgccgcggcccgagccgcgtactgatccggtatgccgccggcgaacatgttccggtcaagcccgaccaccgcgagccgcggcatcgccgcgacgcatccaggcagccgcccggtcagcctgttcccgccgaggtccagctcgacgagctggctcgacgcgccgccgtcgggcgcctcctcgacggcgccgagcttgttggaccccagccgcagttgctgcagcgacgggtgcgcgaacgcggcgcctgggaccgcgccggacaccgcattgcccgtgaggtcgagcacccgcatcgcgggcagggcggccagcgccgcggcctgcagcggccccgcgaagccgttgccgcgcgccacgacggagacgagcgagcccggcagccgcccgggcgcgtcgaggagcgagccggacagcgcgttgccgctcaggtcgaggtaggcgagcgagcgcatcgcgtccatccgcggcagggtcccggtgaggccgttgtgctgcagctccatccgtttcagggagcccagcgacgcgacctgcggcgggatggcgccggtgagcgcgttgcgggagaggtagagctcctcgagagacgacgccggggtgaagagcgacgccggtatctcgccggagaaggcgttcccggagaggtcgaggacgcggaggctcggcggcagcggggaccccgccgggagcgcgccgtggaagcggttgctggcgagggagaggaacgcgaggaaagggagcgaggcgaggaccgtggcggggagcgtgccggagtaccccgccgggtcgagcgacacgccggtgactcggtggtaggaggaggagttgggcggcgcgtagcagcggacgccgcacgggaaagcggcgcaggggtcgcgggcgaagtcccacgacgcgaggcaggagtaggccggcacggtggcggcgtccacggccgatttcagcgacgcgagcgccgcggcgtccccggggaatgtggtgaccaccgcgtccgcggcagccactcgttggagcacgagcagcaccgcggcggccagctccagcagcaggatcggagcagcggaggaggaagccattgttgcacttgcaccgacggaggagatcatgggaggcaggtgaggtgggggggagagaggcaagacgacggctttgagatgggcgctaaagccgaggtggtaaggtaggctttgagtgggagcagtggaatgtgagctgtggtcagagtgtggcgtgtccgtgttaacccgggaaatccgcggacaaaagggacaaacaaatcgcaccacaccgcaccgcaccgggccccgttcttttcttttttctggcctcgtttttttccggcgtcgcaccacgcatactaggcggttgccaatggcgacgacagcttttgttcgcgtttctgggtgttcgtctcatgattcatccgtatgattagcccggtggatagaatttacaatgccgtgccgtccacttcagagttcagtcgctttgttcgaagcttgaaacactcgtggagttgaggttttatgcgccgaaatcgctaataagtcgcgcggtcggtttttggtccacaaattattttttcggtacgtatacggttgtatatgagtatatctataaagtttggtacatacatttatatcattttttatacatttgaaatgtatacgtaagtataaaaattatacatatgtaaaaaactatataaacataatttatatgcatatatactttgggtatatatgtataagcttcatgtatatatacaactctcttgatgtccggactagcatgtatcacatccttcaaaatcccttatattttgggacggatagagtatatagataaattatataataccttcgttttttaatagatgataacgttgattttttgtcacacgtttaaccattcgttttattttaaaaaaatatgtaatcataatttttttgtgagttggtttatccctcaaagtatttttaacatgatttatatcttatatatctgtataacatttttaactaaaataaatggttaaatatgtgtttaaaagtgaacaattttatctatttaacaaacgaagtacatacgtattaggacattcccaacccaaaacactagacatggtttccataaactccacatcatcaagaaactagtactagacaccactcttccaatacaaacactactatttcatacttaaatttaatgctccttatctcacatgatgtcttggatgttgtgttaaaaccatgtctcatgcaagacatggtttcctcctctttcctcatttattcacttgccatatcatttttcatcctaggtgacaccttatttaatgctattgataccatcctagtcattgggttgggaatggccttagaaggcataagggggactgaccgtgtatcaaccccccttgtgcgctgcaatccttagtacggaaagagcactcaccatctgaacgccacgcaggcaacaagagggagtgtgcccatggagccaggtggtttggctctgggcctctgcacctttgaggggaataagttcaccggaggtccctcaatttaacaacgagatattttaaggtcccttaaccacaaaatcagaaatgtgtatccctaaactctcacaaaccgttcaccggaggtccctcggcagtatttttgcccagttttgctggcgtggcatcctagtcagcaaaaaaaaattaaaaaaagtacgtggagcccacatgtcagttgcacatattgtttttccttctcttttcttctccttctcttctcttttctccacatcgggccggccggacagtatccagaagaaccaggtgaacgccgacgacgggcgagggcggcggcgggcccgcgcggcagcggagcggtgtcgggctgcaggcgaagcggaggcgggcattgaagtagagcgtggcgggtggacgcgagacgaatttattaagcctaattaattcatcattagcaaatgttagcatcacattgtcatatcatagagcaattaggtttaaaagattcgtctcgcaattcacacgtaatctatgtaattagttttttttcctatatttaatactccatacatgtgtccaaatattcgatgtgacagtgtgaaaaattttgacagggatttaaacaggtcctaaagataaaaatattgccaactacggttcgatgtgcaatctaggtaataaaatctacagagtagcagtctagaccttatactccatccgtcccattttaagtgcaaccatgagtttttcacgcccaattttaatcgttcgtcttatttaaaaaaattataattaatatttttgttgttatgagatgataaaatatgaatagtactttactcgtgaattatgtcagggttacgggtaaggtataccctccacccttcgatatacgtcacatatcgatatggtatatttgcgtgcatacggacgttttcggcataagttaaggaaactcattatggagttcacagatgtaaggagtcctcggatagaactaggtcgtcattgtatcgtatcgggtccgatgtctccgcgtcctatttggagaccagttgacctgcggtataaaagggaccccccgggaggacctaaggcatcgaatcttactgccaacatatccaccacagcctacgaagccggagcttacaggagccaagtcgccgggtgatctagtcgaatcaactcgactacgatctcgtcggtatcgtcaagttccactattccctttgtaatctgtggtttccatcatataatcccatatcaactggattagggctattacctatcaaggggtctgaaccagtataatctttgttttctgcctacttgatgtcgtattacgtagatcctcgtaccagcgtaccccaataccctctatatccggtctacgggtatcccccgtcaacagtggtgcgccaggtagggggacttggtgctcaaggttctactactatgacatccagcttcatcgataacagcgtcaacaccagcctcaaccaaggagttcctacttcaacaatgctggtgtggactcaagtcggcgaaatcgtcttcccagtttacaccacggtgccgatctcagctggtccatcaatggccggaaacgagaacgcagtggctacaacccaagacgactccatgtcgaaggatcctcccgccgaagcggagatcggaacatcgacgacatccgagcccgagaaggatcctagtgcggccaaaccttgtcttcccgacaagaatcacgagccgacgaggatgacttccgaggtgacaaggtcctgttttcctattcacaaaaccagaaaacacaccttacaagcctgctgggtttttctcaacgtccacgctgagattcgtgcctgcaaagagcgtggaatccaacgtacttctccaactcgtgatatctattgtcctattcacaagacaaagaatcacgacctctcaagctgcaaggtctttctcagcgccatgaaaacatcacctcctaaggtccagcagtcacgcatccccctcagggatgaggacaaggaacaaggagcgacgctgatctcagatcgatttgttggggtaatcgacatcgatccccacgaaccatcagtcttgcacctgctcgaagactatggatcatcatcaatgagtacgccgcgcgaggtattggctatcgacgagaccggcacgtcagcgcgcgccaatgcggaagcagagaatcaagtgactacaccggcccagcacatcagggccgtcaacgcaatactgagggaaacccccctacgatcccgttctgaacgacgatctcgcacgatggacagaacggttacgggaatcagggaccaacctcagcaacgcgttcgaagaggccgctgctgcagcgcacccggaacagccaccaactggcgatgctaatggtgaaaaccctgaacagcgggaatcgcctcatcgagccacccctccacctcgcggcaccggcgatctccgcgatcacctgaatggtcgccgagaggcgcgacgcacacgagataacgagaaccattcccgacgtcgcgtctcttcacggcttcacgataacaaagaacgaggaggccgttcgagagaagaccgagaccgtgataaccgccacaaccgctgcgatcacgacgatcgcgaacggcggatgctgggcgatactggtcgaggacgttgccataatgacgacgatgatggagatcggcgccgagacaacaacgggtgacgacgaccgggttctcgagaacccggccgacatcctcgtaatcacacgccagaaccaagcgacccatcatcatcgttgttatcttcctcatcctcatcatcagatagacatccgcgaaggacgtacgatcgccgacaacccaccgccctagcgctgggtgtagagctttcggtcgttcacttcgagatgtccgatggcctgaaagattccgaccaagagcaatagagaaatacgatgggagcaccgacccagaagaattccttcaggtttacttcacggtactctacgctgccggagcggacaataacgcattggtgaattacttgccaactgcattgaaaggctctacgcgttcatggctaatgcatcttccccctactcgatttctctgtgggcagacctgtggcagcagttcgtcgccaacttccaaggaacttacaagcgccacgcgattgaagacgacctacttgcgttgacacagaacccgggtgaatccttgagggattatgttcggcgctttaacgagtgcagaaatacaatccctgaaattaccgacgcttctgtaattcgtgctttcaagtccggtgtcagagatcgctatactactcaggagttggcaacaaagcgcgtcacgactactcggagattattcgaaattgtcgatcgatacactcatgcggacaacgcactgagacgcaagaacgacaaaccaaagaccggagaagagaataaactagccaaggacgcacttgagtcaagcaagaagaaaaatcgtaagaatgggaaaaggaaagctcaagcggaagttctcgcaatagaatacgcggaccctcccaagcgcccagacccacaaggcagcgacgcgaagaaaacatggtgccctatacacaagtcagacagacactctctagaagattgcctcatctttaaaaagtcgctcgcaaaacacatggcattgaaaaaaggcaagcgagtacgtgtggtcgagaaggacgctgaggcggctactcaggaatcagactcaacatatccagattccgatctccatgtcttgcacatcttcgggggttccacggcatactcctcaaagcgagaatacaagaaggtggaacgtgaagactgttcgatgtggcagggggctgcgcccaagatgaagtggtccgagcagaagatagaattcttagaagaggaccaccccaagactgctgttatcctagggcgatatccgatcgtggtcgaacccactattcggaatatcaaggtcgcatgagttctgatcgacggcggcagctcaatcaaccttctcttcgccagcaccttggacgcgatggggatcccacgaagcgagttgacacccaccgatcaacccttccatggaatcactcctcagtcatcgtccaaaccattgggcaaaattatgttgcctgtgactttcggccatgcaaataacttccgaacggaacagatcacctttgatgtcactgaattcgatacagcatagaatgccatcattgggagaactgcactcgcgaaattcatggccgcatctcactacgcgtatcaggttctcaagatgccgggaccgaagggaacaatcactattcaagggatgctaagctggcagtgcaatgcgacaagcggatcctcgacatggtcgagcacacgcccagcccacctgccacagctgagccacccaagaaagtgagcaaaacaaacaagacgccgaaaccggacggcgcaatcaagatcgttccactctccagtgccaaccccgacaagaccgtcaagatcggggcatcactaggcgagaaataggaactcgtgctcatcaccttcctccgcgacaatgctgacgtgttcgcttggcagccgtccgacatgccgggggtacccagggaggtgattgagcataaactcatggtgcgacccgatgccaagccactaaagcaaaaactgcgaagatttgcaccagatcgaaaacaagccatacgagaagaactcgacaagcttctcaaagccggtttcattagagaggtactccatccagaatggatagccaacccagtcatggtacggaaggccaacgggaaatggagaatatgtgtcgatttcaccgacctcaacaaggcgtgtcccaaggatcacttccctcttcctcgaatagaccaactggtggactcaacagccggttgtaagttgttgagctttctcgacgcttactccggctaccaccaaatcagcatggcgaaagaagatgaggagaagatagcattcatcatgccgttcggggtattctgctacgttaagatgccgttcggactaataaccgcaggaaacactttccagcgcacggtccaaggtgcacttagtgaccaactcggaaacaatgtcgaggcctacatcgatgacattgttgttaagatcaagacaagcgactcattgattgacgatctgcgggaaacgttcgacaacctccgacgatatcgcctcatgctcaatccagagaagtgcacgttcggagtaccatcgggcaagctgctcggtttcctcgtctctggcagaggaatagaagcaaaccccgagaagatcaaggcaatcgagaacatgaagtcgcctacaagactcaaggaggtacagaagttaaccggatgcatggcggcactaagcaggttcgtcgctaggatgggagagcgaggacaacctttcttcgctctgctaaagaagcaagacaaatttgtatggacacaggaagccgaagaggcattcattgcactcaagcgctacctatcaaatcctcctgtacttgttgtcccccaacctaatgaagaattatttctctatattgccgccacgccatattccgttagcactgtcattgttgtcgagagagagaaggtgcaacgactagtctactacatcagcgaagctctccacaacacaaagacaagatatccacagatccaaaaactgctctacgcggtaatcatgacatcaagaaagctacgccactacttccaagcccacagggtcacagttgtatcctccttccctcttggtgaagtagtgagaaacatagacgttgtcggccgcattgcgaaatgggtagtcgagctaagccaatttgatttccgctttgtgccacgaatagccatcaagtccgaggtacttgttgacttcgtagccgattgcctgataacaggtcagacaaccaaatcgacaacgaaacatggacaatggcgttcgacggcgcactcaacagccaaggagcaggggtaggattcatcttgacatcacatttgggagatcaattcaagcatgcaattcacctcaacttcagggcgaccaataacacaaccgagtacgaaggactactcgccgggataagagctgcagctgcattcggagttaggcgactaattgtgaaaggggattccgaactagtcacgaaccaggtgcataaagattacaagtgctctagccccgagttatccaagtatctcgcagaagttaggaagctggaaaaaaggttcgatgggatcgaggtccgacatgtataccacaaagacaacatcgaactggataatctagcacagtgtgcgtccagacgagagccacttgaacctggcacctttctggacgtcctgaataggccatcagtgaaagaggcaagcggcgaagatagcccggtcgcccccaacatcagctcgggggttatagaggcagagcgcgccgttgccgatatcgagaccacagacgactagcgcaccccactcattaaattcataggcagcgaagagtttcccgaggacgacgcagaagctgagaaaatatcccgcaaagcaaaagtctaatgtatgatcggcaaggatctatacaagaaggcaccaaacggggtactcctaaaatgtgtctcgtccgacgacggcagacacctcctcctcgtcatacatgaaggcatctgtgggtcacatgccgccggtcggacattagtcggaaaagcttttcgacaagggttcttctggccaaccgccctcaaagacgcctgcgacatggttcaatggtgtgaagcctgtcaattccacagtaaaaacacaaggttaccagcgcaagcactccagactatccctctcacttggccgttctcgtgctgggggctagatatacttgggccattcccacgaggacagggcggctacaggttcctattcgtggcgatcgacaaattcactaagtggattgaagcgacacccacgggggaaatcaaggccgacaacgccatcaaattcatcaaagggacattctgcagattcggattgccccaccgtatcataacggacaacggctcccagttcatcagtgccgatttccaagattactgcatcaggctgggagtcaagatctgcttcgcctcggtttctcacccttagagcaatggacaagtcgagagggcaaacggcatagaactacaaggaatcaagacccgcgtctacgacaggctcatgtcacatgataagaagtgcgtaccacaccgacaacatccaacaaggagacacccttcttcctcatgtacggctcagaggccatgctccccaccgagctatgacatcaaagtacacgagtacagaagtattccgatgaggatcaggaggagcagcaaaacaacgatgtgaatctactcgaggaaaatcgcgaacgagttgccgttcgagcagccagctaccaacaggcccttcgccgttaccacgagaagcgcatccgagcacgcacgctttcgatcggcgactacgtcctccgacgggttcaaagccaagcagggcgaaacaagctctcacccaaatgggaaggaccgtacacgatcacacaagttctgcggccaggcgcattcaaaattgcagacggcgatagtcgcgagttggcaaattcctggaacattgatcaattacataaattctatgtataagtcaatagtatccatacttgtaagacatcttacagcttcaataaagcctatttttcaggtccagaccacaatcaaagtgttccttcccgatgatcccttacccagatgacacctagcgttgaaacctatcctcatgtccctttacgccgtcttgacaaggcctccgaggaacctaagggaacttcggctggggatgcccagagccgataaggccttgtcggatcctgtagagacgaaagaccatgtaagatctggtcgtgtaagagttctcgccgtgcgtattaaccaagccgtgtaattggaaataaaatttccaacttcacggctgggggctaggatcagtgcttgttcaaccgaggcaggtcaaaggtccaagagccttatcttccgagaagaattctccgatgacaaggctggaggctagggagagtgtataactcaaacgactaattgaagtcgcgaagtgagaagacactcatacacgccacatccagagtaagaaagcttagttagatagatttcttttctatttcacaagtacttcttacaattccatcaaaatcaaaaattatattacactttttccctaagacatttgtcacaggacacgaagactaccaggaagtccaacgccagtccatcgactgaaagaccttctccgccagcggcgccattgatttcgccaggccatctatctccgtaggagttctccgagaacgagaaaacccttcgcggaggaactcgaggtgcagctgcggacgatgatctcgtaggaaagccaacatatgccccccggcatatcggcttgatcgacgacactcccgcttcaaggcttcgtcaatacgttgaccgatgtcttcgagctgggcgcaggctccattcagccacgagatatatccggccgccgactcctcgggatccccacggggtactcggagctctctacagactctggacatggatgtgcagcaactctttagatatgagttgaaccacacctcacgaccccggagtgtctctatggcctggtccttcttcacttccagcatagttctctcgagttccgcgacctcaaacttcgtcctccaatactggatgcgacgatcctggtcagtgagcgcaccctcgaggtctgcgcagcatggaaacgattaagtcaagctgctcctctctcccgagaatacaacaaatcaagtcgatctagatggaagggtaaaggaaatgataacaaagacaaccaacctaagggagtcgttgccacgctcgtttccacaggcgaactttgatctacatcgccccccggcacatgtggctcgaacgcaagttgccggaacgatcactggcaactcagactgcccgcgctgctggacatcctcgacatcaatatctctacaaacgacaacaaagtactcaagatcacaatgctaaagaaagctaaggtgatgaccgcacacacaaaggcagttggaaccaataagagttttacaaagcatgactaaagaggacaagagagctaagatcctactctttaaaaagcgggaggacggactaccccagatcgccgacctcctccatcacatccttgcgcgcatcgctagccgccccctgatccaagatcttccgcagatcgagttcagggtgcgccagcctcacacacgcaaggacatggcacaccccggtatagatcccgttggacgtctcctctccgatcctggccacgtgcttggaggggatcgcctccatcgccgtcgccagttccgcaagcgaagacgtcagcaagaactcgtcgggattcgccgggatggtggccttgacgccgcactccccggcgagctggtgcagaccggtgtaggtgacccgcagtgagccacggatctccgacaagtggttctcaagctccgacatacggtgctcgagcccttgccgttgtcgctcattgccagccaccagctcccgcatcttctggaggtcctcgtgaacctccgccaaatcgcgcgccagccggtcggcgcgctcattcgctgacgacgtcgccgctgccctcgcctccgcgatctcgcggctaatgccgcgagcaccagcctcgacgaggcgccccatctcgagctggagctccttccaggtaaggacggtagccggcagaccccgaccagccgcaagatcgctagctgggccgctaggtgtcgcctcgcggctcctgggcacgaccacgacatccgtcgaggccacggcaggagacacgctggaggtccctctagacccgtcttgcgccgccttcacccgcgccgccctacgaaaagctacaactgagacaggctgcaatagtttgaagaagtgacgaaacctcaaagtcatccacttacttctcaccaagcgtcactagccgccgccatcgcggaggcgggggacacgcgtccgaggcctagagtacaaccgatatgatgtgaggtggaagttttccgactacgtgatcaaagaacaggagaacttaccgagggggtgggtgtcttccgatgatgtccgaccacagaggagaatttcctcccctttttcgaaacgatgccgccactcgttgtgacagcagcggcaacaccgtcagacgcctccttggtgactttctccttcaacgacgccgccacctgatggtccacgagcggcccaatgatatcagtcagagggagagcctacgcttcatgaagtcataatgcgatcccggaagaaaaatgcaaaaggactgctgagtacacttacattgatggcagcgtcgcgctcggctagccctttctcgcaaagggggacggggacgttgctcgccgttgtcgggccactgatcatcagttggccgacgcggcgctccacggttgcactgtccaaacctgtagatcgagaccagaatccgataagtcgggaaaaacacgcgtataagggagtcaatttaactaaaaagaaaaataccccgaggagaaacccgggtcgcgtcctccggcccagaataatcaaaggctggatgggctcgagcctggagcggctggatctgcctactaatgaagtcggcagcgacttcataccccgacagtccccgtactcggaggtcatcaatgatatcgatgaaagattggagggatggggtcaaggcgggtttggtagtccaagatgaaatcttgtctggttgctcctcaggatcaataaagaccggatccgaattttctatctgaagatagaaccacctcccccaccatttgttgcgagatgaggggcactggaaggggatgtatcacgacttcaggccatcccgaagtcggaaaccgacacatccagacaccttttttggttccatccagcgcaacttatagtaaaagcggaagaggccaagaaacggctctaccccaatgtaggcctcacaaagatgcgaaaagatactcaggaaggcgatggaattggggttcaaatggagcaaagaaagaccgtagaaattcaagaccaagagaagaaattcagaaggcggaggaagaaaaccacagagaataaagtcctcgatcgcaaccatgcgacccaggacaggctggggttcagtacctcctacttctctctccacggtcccacgaccgggaagggcgccatcctcctgcaacttcttcagcgacgtgctggtgaaggtagacttgtcgagattcattgctgccgggaatcgccggagaaaggaccgagatgagctagctagggttttttgtggaagcggagaagactagggacgcttagaggctggagagttttttcacaacaggcggacttcaaattggatccccaaaactcccttaaatagacgcacctccgacggtgcgaattccaaggaaagaagagagatggccgccggaaatttctgggtccgttacgtgcggcagtttttcggacttcaatttaaattcactcatgaccgttgagcttcacccggcgttgtcgatcactccttgtctctcggtcctcacgacgagaacgacgacaacttcgacatcagaagtcgcgatcggtttcacgagttcatttaagcagaagtcgggggctactgtcagggttacgggtaaggtataccctccacccttcgatatacgtcacatatcgatatggtatacttgcgcgcatacggacgttttcggcataagttaaggaaactcattatggagttcacagatgtaaggagtcctactcggatagaactgggtcgtcattgtatcatatcgggttcgatgtctccgagtcctactgggagaccagttgacctacggtataaaagggacccccgggaggacctaaggcatcgaatcttatcgccaacatatccaccacaacctacgaagccggagcttacaggagccaagtcgccgaatcatctagtcgaatcaactcgattatgatctcgtcggtatcgtcaagttccactattccctttgtaatctgtggtttccatcatataatcccatatcaactggattacggctattacctatcaaggggcctgaaccagtataatctttgttttctgcctgcttgatgtcgtattatgtagatcctcgtaccagcataccccaataccctctatatccggtctacgggtatcccccatcgataaattatgtttttaatttttttaaataagacggacgattaaagttaagtgcggaaaactatggctgcacttaaaatgagacggggggagtagacggcaaattagccgaagtacgtggtatggcaggctagttaggttgtgcttgatgacttataggtgaatgcgttcttgattctgtttgttggcacagcccgttcgactgccaaggccttattgctggtgggatcctcactaatctgctgtcaaggcccatcagtgtgtacatgtatcaattatgatgcaaataggtacgcaaaagattgcatatgctgatgaaaaaaagaaatgcatgtgtgccatttgacagaaaaatatcaattaaatcttacaaattttaaatacgcttcaaaaattcatgcgctatatatttaatcctaacccctcttctcctctctcatcatttcagtgctgcttcaactcgcaagtcgcgagcttctacttgtctgcgtgatgccttcgccatcggccatcgccctacactgcccggccggtctcctcccctcccctcgcctccccctccatctttctcttcccaaagccaccagcagcgagtacccccgccctactatcttctccgtcttcagtagttcccaccaccagtcaccgctaattccggcccaccgtcctcctctatccccgtggctctggtgttgtcaccacatttctgcccatcggtgtcaaccgtccatcgtcttccatgtccatccctctaaactcgagatcttccccctccccccaccctcctgctctcatcctaaacttatgaccctaaatcctaatacattggagggcaaggtaatcttcagagcaacacattggctcagattttgggcactgctataaaagtgtgatgaagagggcgattgtttaaaagttgcatgtcgttgtcgacgggggatacccgtagaccggatatagagggtattggggtctgttggtacgaggattgacgtagtacgacatcaagcaaataaaagataaggattatattggtttaggccccttagtatgtaatagccctaatccaattggtatgggattatatgatggaaaccacatattacaaagggaatagcagaactcgatgataccgacgagaccgtagtcgagttggtcctactagatctcccggcgatttggctcctgcacgctccggctccgtaggctgtggtgggtgcgttggcagtgatattcgatgccttaggtcctgcccagggggtcccttatataccgcgggtcagttgatctccaagtaggacttggagatatcggacccctcacgatttggtaaagacccagtcttgtctaattagaactccttccattcgtagataccatccctatcatgtgataaatttccttaatgtatacggaaactatccgtatacgcgcgggtataccagtttccgtatacgcgcgggtatagcgtatcagtatacaacgtacatccaaggatagagggtataccttatccataaccctgacagttgtaatcttgaggcaacggttatgcaactgtttaccaattttagatggagattcacaaacagaattcaataattgtgtactccttatcttgggtaggtaggtatcttcttttttgtgtgagaaactttttattttatatgttactctataataattggctgtagctgatgaagcaaaggctatgatattttattccattatctaaaaaatcctaactcatcgaatcagcggtcatcggagttgcaggagaaaaagctggatagtcagaacacgaatcacgacgtgaattccaagattagaaattcactggattttggccctaatgtttttatcaacaaccatttagcatttctaaaaagaaaagaaaaacatgattgttcccgtatcatcaacgagcacgtaaaaacatgattgttcccgtatcatcaacgagcacgtgcatcctattaaaaaaaatatgcgtgtgcgtgttgtatgcacgcaaaaagggaacgggatcctctgacgtagagcgatctacgtcagagggacgtccgatgctgctacaccgctcgatcagcatcggacggaggagaacaaacacggcagatttactggcttcattactgcccacgccgacaaaatcaacccacgaaaacgaaaaggctcactaatgaccgcttccctcatcatatattcatatgccgccgagttcttcgccgacagtgccgcagcgcagcatcccgcggcggcgccgtccgtgttgagtgcgtggttcgcctacgcggacctcctgccgctggggccagcacttctgcccgagccataggccatggctgcctcctcgagctcacgctcaattcaaatggagcactgctgaatctcacttttcatagcagaatcaacatcttggttgtgctttgagcatggatgcatgcaagcgtgctgtgaatggcatttgcgatgaacccccgcaagatgaacgacatgcatggagcatggtgatcgtcaggagggccttgctgccgggatgggtgctgcatggccacgttgactacgtctccggcgggccgcaaccggccgtccggctgggatttatttcgcatccccccggggcatccacgcactccggatggcgcaggcggtggcggtgcgctccaaggcatgcagcgtacacgctgatgttcccagccacatgcacctacgcgcgacgacgacctgcacgtcgccgtgacgccgtcgttctccgcgccggccgacgtctctgagcgcagcgtgagcagtcaagaagccagtaagtctgccgtgcttgttctcctcggtccgatgccgatcgagcggtgtagcagcattggacgtccctctgacgtaggatgccgttcccacaacaagtatgccagcggtctcttccacaaccatgatattacaattcagaatagtagtattagtagttagtacctccgtttcaaaataaacacaaccataaaatttatgtctaaattgatcgttcgtcttatttaatattttataattagtatttttattgttattagattataaaacatgaatagtactttgtagacttgtgttttttagtttttttataagtaatttaaataagacggacgattaagtttggacacggaaacttatggctacacttattttgggatcgagggagtagtactactactaagctggtgagatgtcttgtctactttttagtccctgtcacatcggatgtttagacgctaatttggagtattaaacatagactaataaaaaaactaatttcataaataagagctaattcgcgagacgaattttttaaacctaattaatccataattatgaaaagtttactgtagcatcatattgtcaaatcatatcgtaattaggctcaaaagattcatctcgtgaattagtccaaggttatggaattagtctatgtttaatactccaaattagtgcccaaacatctgatgtgacagggacttggaataagtccctgtttcctaaactgccccgtaaggtcctgaattttgttatcaacatcacatcatctgacacctattgctgaaaaagaaaaagactattctctccgtcctaaaaaaaaattcattcctaacttctcaagatgaaactagagtagagtacaaatgactaaaatgcccttaattattataataagtataatataatagtgataagtgggtaaagagtatcgaagagataaaacttctcgttttatgtgctgagggcaagtaggatcgatggtagagttaatttttttatgggacaaaatttaaaattcaggaagtatttttttgggatggaggattatatgatgacttaataaggataaagtatacagctccctctattttgcctaagggagaatatattgttcaacatctatatactaattgacacttataaactctcctaaaaaatatagctgttgttaaaacaggtcgtattgtattaaccgtaatcttattaaaaatcatattagataaaatatgcaatcgcaaatatcatgatttttttagtttttatttttaatcattataagttcgaaactaatagacgtaaatttgtatccattttggactctattttattaagttaatattgaaaataatagttagcaagttgtaaaacatgaatacctttttcaatttaacttacaacaattcaaaagcagctgacatattcaacacgaaattaaacttttgtatagcggagataatataaacatatgcaacttatgtgttggcgactaatgtttaaatttaaaatacaagtaaactatttgtcttgcctcaacaacctctatttttttggaaaaaaaatagttaatgcctgtaagtcaaaatttccagcgtacatgcatataagttgttttcaacttatgcacaagaattaatgaaagtagcttaaatagtttagttctacatcaagtaataaaatgagtattttactatctctatctcgaaataaggggttttgcatatgcactttggggcggagatagtatttgttaccgacatacatctatttagcaagggtaatactacctccatctcataataattgtaattttgtcccaatataattatcgcactaaagtactaattgtcacattaattacttttgatttggttttttccctattctaccctcagccatcatcccactcttacctatatatcatttagtgaggggcatctttgtcttttttcttaaaccataatatatgctaaataatctagaattataaatattttgggatagaggtagtaagaaagaaatcatgaaaaagtgccaaaaaaaactataaaacaactcatatttaggaaagatacgagaaggtaaaatattttgaacgaattatcatcattatctttaaaactactcccatctatattataagttgctttggaattatactaattcatacttctacaaatttgaccaaatttataaaaaaaatatggcaaaatttttaacataaaacaaatatatcataaaaatatattcaataatggatttaataaaactaatttaatattgttgatgtcactatattttttttataaatttaatcaaacttaacaatattaaattaacttagcagcaaccaattgtatggattggaaccgagggagtaagagctaatgtcaagttctttgtaattgttacctaggaggtcatcactcacctagaaaccatcaattagtttccgtacttatcatgttatatactccctttgtcccaaaatatagcaacttttagttagatgggacatatcctagtactacgaatctggacacatatcgcatgtccagattcgtagtaataggatatatcacatccaactaaaaagttgctatattttaggacagagtagatactaggtatataaactatatattcaatggatgatattttcaaattaagtactcatccaattacctctcttctctatcattttatccacatatccgatccctttatttttattcatgattggtttcttacatgagaaacgatttcttcatctttttgtttctctcctcctttaactctcttaccacatctgtattcattggtatgataccagattacatggaggattggagatggccgaaaggctatccctgcaagtcaacgagccggtgcagatggctacctacgtcggtacagttatgaagttaagatgtttgttggtcattccagttggcgcccaaaccgcacaaattatatatccattaatatcctcagctaaacataagagcaaatgatcctaattctaactaattctaaacatcgcaattacgatataactttatctggttgatagttgaggtgatatagacgaacgttaatatcccatctgcaaaagtactccataatactgtaggaacgacgtcactgcctctggtgctcgtgcaatctctgtctctgctgatttggcagaaattaatgcctgattgacccaacccgattgggattagatgcagtcccaactacagctgcacgttagggactacacaagatcttgtccattcaatttctcaatggaaggtctagattaaatgctacagtaggcttcctataatatgtctttgctagattttctgtatgaacagtgtcttattaaatttgagcctttggatttgtatcctacagctatagtatgactgtcttaggttgcagtcatactaaggactgcacaggaaccaaatccaacccaacgtatgcctctttgatcagttttgacaccagtacacatcccccgttatatatacggattgggtcgcaacgttttgcatgtgtacgtcggcgttcacctcaggcagtagctaagaaccgggacaaattaatcgtctggttgacggtggttgacgttcattatgggggcttctaaaaaccatcgttaaagagagccatccatcagctacgtacggcgccatctgcatcgagtaatgaactgccaatgaatttgaactgcacatcaaacagttgaggcgttgatcgaactgcataatcaatacgtagatcctagccccgacaacagggacactacgccagtttagataattgttttgattatcatgtacagctgaagcctgatcatcacagaacgtagtccagccgaatttgattttcgtcggttgagaggacatcctctcattttttatagcacctaaatagttattagaaaaacaataaaaatatatattaatatgagatatatcacttcagaaacattcaaaattaaatccgacttcaacaagttgtgaaaaaaagaacaaattaaactgaaatagtttatatacatatatagttgtatttgtatttttgttataacttgtagaaatcgaacttgattgtgaagtaatatatctcatattaatttatcttgtctttctttttatcaatttttttcggatcactctttaggtgataccccctccgtttcaggttataagacattttgactttgatcgaagtcaaactgtttcaagtttgactaagcttataaacaaatatataaatatttataactagctgggtggcccgcgcgattgcgcggctagcacccatataaaattatatattttttaatatgatttcacttaaaatttattaaatagttatctcgatgtcttaagatggccaaaccttattatcctcgtgtttcaaatttcatagtttttgaaaatcacatcagcaccctttacttctatcatattattcgttattatatagctcaatctaccactgtttctattcattcttcttataacctttaaaaattagatctaaaatttttttggactttattgtcctgttggacttgttttttataatttctagaagtcccgtcaaacgctgtcattatactcctctacgaccgtccattgcatcttctctttattgtcattattatttaaaatatattataattattgtttaggatcattttttttattttatagaagttccgccaaaacatcagcgactttgtcactgtactcctctacggctcgcccgctgccgcccttctttattgtcattgagattttaaaatcaaacatgattatcattggggtttattttttatttttagaagaccgaacctttaaaaattggaccttatagtttttagagtttattgtcccgttgggtttcatttttttcataatagaaatcctatcaaacgctgccaatatactcctctacgacccatccgccgcatactctttattgccattgggattgtaaaactcaaacataactatcgttggaattcattttttattttctagaagacccacaaccatcggtggctatgccattgtactcctatacgacccgccagctgcctcttatttttattgtaattgagattttaaaaatcaaatatgattatcattggggtttatttttttactttctagaagccccgccaaccgtcttgaccgatgattcacgacctgcccatcgtccttcgttttaatcgtcattaggattttgtttggcgttttattaatagtttttagatgtcccatgaaccgccaccactctgctcctatatagacctgttacttaattaatctcgtcatgtgttttagatggtattttctttccatagtctttatttttatcaacaattttagttatttataaattatattcctagttgaaattttacttttctttttctaatttcagattttattttatttttattccgaatttaattaatctactattggttcttatatttactcttatttcaatattgcttatatttaattcaaattgtattcctacttgaactcttcttttcttttcctttttctaattttgatttttttattttattttttatcctgaattttaattaatctcgtattggattcctgtatgtactcttctttcaatatttcttatttttaattccgaatttcagttattttaaaattgtattcctactcgaactcttctccttttttttgctaatttaggattttattttatttttattccgaatttgattaatctcgtattaggttcctatacggactcctctttcaatattgcttacttttaattccgaatttcagcttttttagattgtatttctatttggactcttcttttctttttctccgattaatataggaatttctagcccccacagcgaacgtggtgccttatttccaggttgttttaataatataatagatactaaattagtttcatcaaattattgaatatattttcataataaatttatcttgggttgaaaatgttactacttttttttacaaacttaatcaaacttaaaatagtttgattttgatcacagtcaaaacgtttatgtaagaaataagtggatgcctactcgaaagatgaaatatcactttaccgatagatcattgtctattttctcctagttgacgcacgttgccgctctcgcctattctgcgcgcgtgtacccctagataggtagtatagtagctatactacgctactatactcgtggcacgttcgattcctctgtaaagagaggattaaattttggatactagtatcacgtttttcaaactgctaaacggtgtatttcgtgcgaaaactttctatattaaagttactctaaaatatcagattaatctattttttaagtttataataattaaaactcaattaatcacacattattacaacatcgttttgcgtgaaacacttaatcttaatcttcatgagattcaaataccaccacctatgtgccatgggttgatgaaggatactacaatacactgctatgagtatcaaattatataatgttatgatcattggcaaaaaggatctaaatgtaaaatgtagatatgcacttgctaatatagggattggataagggttacgtggtttcaaccttaaggtcgtgggttgaattcctagctcatgggcacactttgtatccttaattatgatgccaggtttctttatatgctgtgcaggacaattctctcactactagaaaaccaattttcccaagcggccaaaactaattttcgcagacgggagggaggtccgcctgcaacacaacgactgtgaaaatcaatgattttcgtagtcggggcaacgccccgcctgcgaaaatgcaaaaaaacgaataaaaaaaatcgccgcaccgccgccgccacgcgcctcgccgccgcccccctcccccagccggatctaagaggggaggggaggggacccaccgccgccgccgtcgtcgtcatcgccgctgccgccgtcgtcgtcgctgccgctgctccatgccgtcgttgccgccgtcggcctcccccctccctcccccggccagatttgcgagggagggagggaggggagacgccgccggccgacctgcgccgcaccgcgcaggccgtcgccgccgtcgcccccgccggccccccccctccctcctccggccagatctaggagggagggggcgaggggagacgccgccggccgcgcgccctgtgccgccctgcgcgtgtcgcctccgtcgtcggccccgccgcgccgccggagatgagaggagaggagagtcagtgagggagaggagaggagagtcagtgagactgagtcagtggatggagagggagagagagagagttgagtggtggggggtgggaggagaagataagggtgggttttttttttgtagatacgatttttgctgtcggaccacaaaaggttcgcatgcgaaaatctattttcgcaggcgccgcttaagtagtccacctgtgaaaatgattttcacaggcgccgcttaagtgggattttcgcaggcggacagcgaacttcaccccgatttatatttttgtaggcggtcatttggctataagaatcatgtccgcctgcgaaaaaaagacccctacgttggaaaaaatgtgttttctatagtgtcttgatccacaatgaaaaagtaaaatacgatcgcacacttttgttccacaataaaagagtaacaaatgtatatgttgcgttggattgaaattaaacggtatatattagctttgtaatgcagtaaaactgttgtagtataaatattgtttatatactgttgtttcagtacagtagcagtggggttaaaagaacaggtactatcgtaatgaatctgagcttttgatcatcaaaatgaacggcttacaatacatgcagtccagtctggatctcaatccggtgtagataagtttagtgtttgcctgctgtcgggctgcatcctagtatcttatagtataaaagatcatttctctttgtaaagatagaatcgtgagttttcgtgtccaactttaatctatgtcttatttaatttttttaaaaaaattaaaaaatataagtcacgcataaagtactatgtttatcatctaataacaataaaaatactaatcataaaaaaatttcaaataagacggacgattaaagttgaacacgtaaacttatggctacgcttaaaatgtgacggagggagtatataactacatgttaggtcggtggacttctagtttgttcactattctttagaaatgcatttatagttcactaatttattgtgttacatatttacgtcaaaacaatatactattgttatactaggcgatcaacctataaaaatataaagtgaagacaaagaatgattgatccatttatactctaacgctctctttaccaacagactcccttttagtccctgaaaagaaattaaaaaaatacatttatttttgaacttctgcagttacctattcaaagtcccacatttattactggttgtagaactcataaattaacctttgaaaacctaaaacaagggaaaatttgaaccattccaccctgactcatgtgttattgactcatgtgggtcctacatgtcattgagatatgagtggcatatcttaaattttataaaattagggtgatatggttccaacaaacccttaaaacaaacgcttccactgttataaagactgctactctatccgtctcaaaatttgaattagtatatagctgcatttgttttaggacgaatgaaggccggtactctttcacttcacattttaactttaactccgtaacgctgacgatccaagatagggatcggaacaaaggcaaacaggtcccaagtcccaactgtacccgtgtcatccgcaacagctagcaatcgatcaacgagcgccactttatccctcctcccctctggctctgcccgccccaccggtacgtgacgagcgacggcgcatcgcgacgcaactgcctgtctgccacgcccagcgccccgcccgtcagctcgtgcactatttaaccccaccatgccgtgcgccacactgatcaggccaaatcgcctgcaataattctctcgccgtgtaacaacaacacacgcgccagccgagagaaaccaaacactagacccccaccacgagttcacgacgtgcacgagcgagcgagctagaaaagcaagcgagagcgagcgcatggccccggcaatggtagccgccatgggagagaagccgaagcccgcagtcgtgttgggcggcatggtgagcgggctgagggaggtgtacgagagcgggaggaccaaggacctggagtggaggcagtcgcagctcaaggcgctcatcaggctcctcaccgacaaggaggaggagatcttcgccgtcctccacgacgacctcggcaagcaccgcggcgagtcgttccgagacgaggtgacgatcgagcgagtcaccgccgacacgtttactaatccgtcccatgcatgcatgctttggtctctctgcatttggtttataagctggtatatggtttttgtatgtaccgtcttcagcttgggattcttgtcaagtcgatcaagtacacgctgcaaaacctcaagaaatgggcggcttcggagagggtgagcagtaagctcgtgcagtgttacatctgcatgcatttcagacaggtactagctcttgttaccatggctgtggcctcctacgctgtgcttttgtttgctgtaggcggaatcgccgttggttgcattccctgcgaccgcgatggtggtgccggagccgctcggtgtcgtgctcgttttctcctgctggaatctgccactaggtgaagtgaaataaaccctatactctgttctgttctagaagaagcagaaatctctcggtagcaagttctctagagttatattttgccataatggccaaaaggtgtctgttaaatcacaaataaactcccttgcccacttgcccgcccgaaaatcagggactggcacgttgttatcatgttggatatgcatcatctcacggtattaattgcctcgtggattaagttattattacactccactcaacctaccagaacccattacgaagcagtgaagacgactctgtatcgacaggaacgtgcgtggttgtaacgacaaatcacgttatttcgatacaggttaatcacgggtcacaatactatgtagattgatttgatatatatctaaccgactcatacgggcaattgagacaatttggtatcacacggggttgttatcagttgcactcatcacccttgggtgttcacaagatgatgtattgatgtggtccagaaatctgtaacactgttcatcgcagcactgtaccagaagaattactccctccgtcccacaacaagcaaaccgtggattcccgtgttaacgtttaattgtccgtcttatatgattttttttataattagtattttcattgttgttagatgataaaacatgattaatattttatgcatgacttatctttttaattttttataacttttttaaataagacgaacagtcaaacattggaaacggaaatcaaggtttgtctttttttttggacggaaggagtatgtagatagagctgtgacggttactgtaggtcaaatgtttagacgttgatgcccctgatctgacagctgggaaatggaatgcactccatggttaccctaaatgcagatatattgtagaaaaacaaaatttatactatttttctcatcctaaaatataacaacctatgataatattagacttatcctaaaccatgaatttggacataccgtatgataaattcgttgtgttaggataagtttaatcccattctaaattgttactatattttaaaacggagggagtagaaagttttataaatgcttggctaatgaagttagttgaattgaattgctcgtactttctcatgaacttaagtttttaagcgagttggctaatagtccatgatgcacgttaatatggtattagagtcaggcatggaattcatatgatagctgatgtgattaaatgaaaaacttgaagctcttccattccatgtattataagagcaagtttaatagtacaatcaactactagctccaaatcatttgtaatcaatttaatagctaattcatacaataagaacatataaacgtatactacactattagcacatagtcccacctgccatacatacattttgtctaggagcccgtgctgcagctagcaacaaatttgtagcccgctgctcatctctctttttttatttccttgatatgtgtttatagctggcatatagcctggtattgtacctgctctaaggtacaacatccacatgattcatgtggagttttgaagtgaaccgttggctctctctcattagctcaagttttttggttgacttggttgacgcatgtactccatccgtcccaaaatataagcatttttagcatagtgataagtcaaacattttcaactttgactattaatagcaaaaaaaaatataaaagatcaatcatgtaaatttgatgttacctagatttatcattaaacaaactatcataatatgtaactatttttatttaaaacattttacttttatagatattgttagtcaaagtagtatcttagagaccgtatcaaagttcaaaaatgcttatattttaggacggaaggagtagcttcataaacacttttgaagcttcatatactaaatgattcaaaatgtagatgggtctcaactactttttttttgcgcaaatcaaacaatacctcttgaattctaataaaatttttaaagaaagaaagtttctgttgtaaatgaatgtagtactctgtatagaaaatatgtaagaattcaacatttcgaattggacctcaatttcaaatttaggattacaaataaaaactatgcatttcaactggggtgttactgtgtcagggtctttactccttaggatttgtttgggtgggcctccgtcctagctcatccacatggatgggtggattggaccaggactaaacccatccaatcgaggcctcgtggagacaaattaacggtttattgtctatttcatatttccctcgtccagagaaagtagtacctcgcctacttaaatttacaagagaaaaaaaagggtggaaataatgcaatatggttcagattctttaaagctttgtttttttaaaaaaatactatatgatccaaatatagattcaatagaacaatacacattattgcagttagttgggtagttaaaaaaattaatgtgatttctcctgcttctcgaggagttgaacataaatatgataacccccgcaaataaaagtatgtactccctccatttcatattataagtcgtttggttttttctctagtcaaacttttttaagtttgattaaatttgtgaaaaaatataatagtattttttaactcaagataaacatattatcaaaatatatgtaatgttagatttaatgaaactaattatatattttagatgttactaatttttttataaacttagttaaacttaataaaatttaacttaaaaaaaagtcaaacgacttataatatgaaaattgtaaacggatgtagtaacgcttaattgtactgtatttaatttaaggatattccgtcaccagtgtcaccaaactaaattaatggaatcatgcccactgcactaaatctggccattctccgtgtgtccgtacgctctgtctgcaggcttagcgttggagccactctccggcgccatagcggccggcaacgccgttgttctgaagccctccgagctcgcgccgtccaccgccgcgttcctcgccgccaacatcccgaggtatctggacagcagggcagtgaaggtcgtcctgggaggccccaatgttggagaggaactcatggagcacagatgggacaaggttcttttcaccggtagtacaaattccattgcctgcaaaatcacctctaatttgtttctcttctcaccatttttcagacggaaaagttatgtaaatctagttgttctcaatgcatatctaatggtcgtttcttgggtttgatcagggagtgccagaataggacgcattatcatggctaaagcagtcaaacacttgaccccggttgcacttgaactgggttcgaaatgcccatgcatcgttgattggctggacagtaagagggataggcaggtagaatcctcaatttctcatcaatattcagtttcgctgcagtatacagtcacactgtaggacaggttgacagtgtcccgtacaccaatgacacagattgcggtgaaccgcataatcggagcgaaatggtcgacttgtgctggtcaggcttgcatcgccatcgatcacgtaatcgtcgaggagagatttgcaccgattctggtctggttcatcattctgaatcctacgcagtaaaacttcttgccatacaaacaccgtgacttacaatgtctcttcttgcacattttttttctgttatctgtagattgagctactgaaatcaactcttaagaggttcatggccaaaccgggtggcatggcccgtatcctgaacgcaaaacattttgagaggttgagtggctatctggaggataatagggtggcagcttctgtagtgcacggtggttacatggaccccaagaaactgtaagttctgaaaacctgttggccaagcgtctgcacacaattggtcccgcacgatttcattcccaattgcttgcaggaatattgagccaaccttactgctaaatcctcctgctgattctgatgtcatgaccgaggaggtatttggcccgattctcccaatcatcacggtacgcactgacaacgattgcatagtttctgggtggatgatttcacatacatctgcaacctacgactgaaccaatttgatcatccgtttgcaggtaaagaagatcgaggattgcatcgcgtatttaaagtccaagccgaaaccgattgcgatgtacgccttcaccaacaacgagaggctgaaacgccggatcgtagaggaaacgtcgtccgggagtgtcacattcaacgacgcagttgtgcaggtatgcacggccacacaccccgtttcagagctaaaactgtaccgcagtaaaattctcatcgttttttgccactgtcatgttgtagtacgctcttgaaagcgtccctttcggcggagttggccatagcggattcggacagtaccacggcaagtactcattcgagctgttcagccacaagaaggcggtgttcaagagaagctttctgatcgagttcatgttcagatacccaccatgggatgagagaaagatcgggacgctgaggcacgtcttcagctataactacttcttgctgttcttcaacctgctcggctttaggagatgaagaagccagccgaagaaagatttcggctgtgaagaagtaagcagagaaagaagctactactatatagtagtatatagtagtagtaatatactacagctaaacacgtggattatatacggttctaccttgtgtgatgtgataatgtatcactatacttcagttgcatattgtattgtcacgttctatgctcttatttattgtactctttggaaagaaagggagggattgttttattttttttaaaaaaatgactagtggaaatagggtgctccgacatgttatacataaaagaagatatgtaaagagtttaagggtgctttggatcctcagcaaggccaatcctagcattgtctagcaggttaagtgtttaatacaagtaaaaaaatagcttttgaagatgttggtatataaagtgaattgctcatcttccctcatcagcttaagcttttgagttgaactggtcggttcatgcaactcaatatggtatcagagccagagatatcgagttcgaatcttgtctggcgcgcaattaaataaaagttacaacccgcttctattccacgctagaaacttgagggggagtgttggaatataaagtgaacgctagagatttgagggagtctcgtttgagggaaagtgttggaatataagtgaattgtccaccttttctcttcagcttaagtttttgggttgaaccacgcaacagtaaatacgctgagctggtgaaaacttccgtaaatacatgttttactcagtcaacgcaagattaaccaaataatggaccttgtttaggtaagctattgagaaagattgttttaaaacgttcaaatcctataataaaattccttttgaggcctaggtttggaccaagggggtatatgctatgtgaatttatctaaagcatacacaaaaatgctagtacttcacttggaatattggagggagattaaggctgtgtttgcaactacaagtttttaccttctaccctctcttttttacgcacacgttttctaaactactttttaaaaaatcatactaatatattttttaagtttttagctaacactaaattaatcgcatgcagtaaaatataacatggtttaaaaactgaaaaggttaccgcatacggtaaaccgtacaattttgtatacattggatgtaccttcacacaagggctccgtccatacattcactgaagaatgagatggtgccggtcctgtgaggctgtcatcagtacaatcggcactgggggagtggattttaaactctcgaggggatgtcccctcgttgtttgcatgttacctaaatggttataaaaaaatttaaaaaaatgagaagatgtattagcatgtgatatatcactccacaaacatgtaaattaaaatttaacttctacaagtcgcaatgaaaaaaacaaaattgactgtgaatatacgttaactaactgtagtttaatttgtttttttcgttgcgagatgtataagttaaatttgaacttgcatgtttgtggagtgatatatcatatattaatacatcttcttaaatttttttaatttttttcataatcatttaggtgacatgcaaacaatgaggggacatccctcgagagttttgaatagtcatgcaaagtaggttttgagcgttgccattttcaacaataattgcacaatatttccacagtttactattcgcataaagaatgatcgatgatgcaacacgttatccgttaataactaatcaaaccaagacgagcacagacagagatctatcaattcccccatgtggcaggagcagagcacaaccgcaaacgaacgaggatttcagagttcagactgcacccagcctggtgtaagcgagcaggataacagcttgcctaaacgctaatgccaagcgatcaagaataatgccttatgcctactcctgaatcacgttgcgagcatcagttttccggttgatccgtcgctgacgaacagagagcttcagggagacttttgcaccctccagaattaagcgatctggattctggactgcatgtgagtggggattttgggggcgagcaaaatgctataaaccaccagctttgctgctctgaaaccacgctgtctttgagtattttatgatcaggctttgtccagccagcctcgcggaacgcactgggcagtagatgcaacccttgcagctacatatcccgtgtctcaatgaaccctactgccccgctgtaatgttccaggaccctcaactgcagactgcaagtgggttatcccgtagggaacctagaatacaaattactaaaaaaatactatacatattaattatctgatgtttaatttatatattaattaaaataacataaagtagttataattaaataatcaatttgggatactgagttagagtatgtagtataatcttttcgcttatacttatcagccaaaatttaaattttcgactttaaatttggagttgattttgggttttttcatcgaagtttatttttcagccattacttttagattgctaagaacacatatataaaagttttattcacaaattattttttatttacaaatatgccgttcgcttattcccctgaataagcgaaacgatgggtccgtaaaattttggatgctggctgcaatttacacaagacgaaaggataactctatccttctctcttaaaaaaagataaattgtacccaaattttgacatgagccatgctgcacatacttaaaatagcaaatttacgacccagagaacgtacctggagatatcatattctgttagtgtaaaatttagtatctctctcagtactttgtgtactaaaatttttgctaaaaatgatgatacctcttggtacatctctacttaaaagttcttactctacttaaaagttcttacaaacttcttattaacaaatatctcaaccacttaatttagttagttgggagttataaaatgttcagatttaatgacactgtgatgtatcaacatggccagtttttgtgaggtattcatcgaaacaatctcaaatacacatgtttcattgctactttttcttcttctttttttagaattacacagtataacacagacactcacaacgcacgcgcattcacccctatgaacgcacgcacacaaaccctatccctatgatcatcttcgaagactgggccggcaaatcctgagattgacaaagtcaccgcatgcgtcgctactttttctaattacatgtatataaaagctatattaaaaatataactgtatgaaagtttttttcatgataaatatattaataccaatttcctatgttaaatccttatgttttatgttaattgttatttaagattttaaggtttgaccgcaagtattttaggatgacatgtagtacttgagaattaaggtaatacttctcccgttaaaaaaagaatttccaaaatcaactcatctgaattcatatttagaaattgattttctctgagacagaaggagcactcggcatctcgtaaagcaaactagttaataataaggcagcgcgaacggtaatgatttttcttaagcaaaattagagggaatgagtgatgtacactcggacatatcgttgcattagttgcacggctcccctacattcattcagctgtactgtatatgcaacgctaatcatgcatacaacttgcagcttattataattaacgtcactacagtaggtgaccaaatggaccggggacgatttgttaacagttacatatataggacacatttatgatttgctcgccctcgcctgtagtctttctcgaaggcttttccgaacgataaaagtcgttttcattccagggccgtcgtcgtccctgatctagcctagctgttcagttggggtgtcaacagcagcgaccaataatatatatcgatgccatcttcttcgtgcgttttctttccaaggttccatatgacctggtcaggttcatgcctcgttttgaagcagcgcgctccacatgttggccttgcagagatctgtatttcgttttctcctgttggaaaacgtgcaggtgtatgggaggggatctgggggatgcatagaaaactgattaggaaaaacagtgtaatcaagaacactacgggaaggcttatgatttatgaactggtaatttggtaaaaagaaatggctctgcatgcacctcctctgccatgtgaaatgaagcggtatatatagatgatgttcatttttcaatttgggattttacgagcgtacaatgtttctaggtgcaatattttgttttctaaaggggggaaataacgcattatctagagggggggggggggtaacaggattttgtacatgttgaagtaggggaatggatataatctcttgaggatattccctcgtatacctttttaattaaatttaatgtaaattattgtgaaaaattcaagaataaaaacaatgtagagagtagtaacatctattatctacaaaaattactctactaaaaattgagttcaaactcaatatacactagtaggaaaataaaaaggataaatcaatatgtaaatagtaccggtattgtttatatgttcaatttgtctttttctattttttgacatgtgaattaattgtaatcttaagattttgtcgagtggtatatatgttgtatgaatattgacaatgttttttttaactatttagatggtgttgacaaaacgaggggatactcctcaagagactatagcagtttcccgttaatgtagaaatatatcatctatttcctctgttttatattataagttgttttgaattttttctagtaaaacttttttagatttgatcaaatttataggaaaatatagtaatattttcaatacaaaataaacatattatcgaaatatatttaatgttacatttaataaaactaatttgattttatagatgttgccaaatttatccataaactcggtcaaatataaagaagtttgattagagaaaaaatcaaaacgatttataatatgaaatttgagggagtatatttactcattggctcaagcttatattccatggcagcatggatagtggaatttgctttgctttgagattttgttttttttttccaatatttgctctagccaagtaaacttctgctgttctgcagtgtggcggcttgttctcttaaattaaccttgttcacatgcgtgcaatagtatagacttagcggctaggaagatctgttcaattcctcgttgctgaatgccagtttgactttcttatcaataatccgtctcaaagtactcacaagatcacatgtttagattaggtaaatcatgtatatcttttcaacaacatgtacaagatcccttgttaatgggccactacatgcctacaataaccgcatccatgcatgacatcacaaaatttttctacttgatcccaaagtttcaactaatccactgatgatgatgagataaggtaaaaaaaaatgaacttttggagcctccctaacatgctatttacagcctttcgacgggtaactcatgaaaccatcttatcgcttggtttggatccgacggctgagatcaacgccgtcgtcttctcctgcagctcgcgcaccacctccgccatggacgggcggagcccggtgccgtcgctgacgcaccgcagcgccagcgccgccacggtggcggcctcctcgacgtcgtagtcacctcccaacctccggtccaccacgtcggccagcttgccctcgccgatcgagggccccacggcggcggtgagccggtgccccgtctgggcgcagatggcctcccgcccggtgacgagctcgagcagcagcacgccgaagctgtacacgtcgctcttcttggtggccacgccggagcggaggaagtgcgggtccgcgtatcccggggagcccatgacggggcggccccacgccctggtggcgccggacggcgggcggaccgcggccgagaacccgacgtgcgcgaagccgaagtcgcagagcttggcgtcgtggttggcgtcgagcagcacgttcgaggacttgatgtcgccgtggatgacggcggggtcccggctctcgtggaggtactccagcgccatcgccacctggaacgcgacggccatgcgccgcgcccacggcagcaccgtccggctcttcccgccgctccggtggtggagcctctcgtggaggtcgccgttcggtgcgtactcgaacaccaatacaccctcatctgcacacagaaacaagttcatgtcagccgccgccgcattaactcaaaacgagttggagatttcgtagatagagttcgtcgatgaggtgacgagtgatttcgtgtttacctcgttcgtcgcagtagccgaggaggcggacgacgtgggggtggcggagggagaggagcacgtcgcgctcctggcagaaggcgcggtggaggcgctcgctgctgcgctgcaccttgacggcgccgaggcgggaggaggtgagcgacgcgaggtacacggtgctgaacccgccctgcccgatcacccgggacgagaatccgcccgtgaccgactcgatctccgcccacccgaaccgcctcgccaccaccccgccgcccttctccaccaccgaccccgcgccgccgccgccgccgccgccgcagcccggctcgtccgacacgcgtgcatcgctctccatctcgccgcctcccacgcagcagcagcgggcaaacgccaagaggccgcacccgtccaacatcttgccgcgcgcgctcgcgcacacgcacacacacgatgtcacgagtacacgccctcttgataccggcttcgcttacgatcgcgatggagagcaggtggtgcaagcgcaacggggacctagatcagccggagcctagtggcgccgttgctatataccgcgaggttttgcatcgcacctctcccctcgagtggacctcaactaatcattgtgcataaagaaatgcgagctcgatcgatcgggccactttttttttaggtgggtgggtgattgatatcgtcatgcgtctcgttctaaacctgtgcgccaataggattaccggaacgttgagggtgcagcaccgcgtggtcatgggtgtgcttaaattcggacaagtattttactcgtaccactaaaacttttttctttcttttctttttggacgaaagccgctttgcggggacgcactagctagatatggatgcgtggaatgtgacgtcctaccggcaggcacaagtcgaagacattttctcgcctttttgtcagagactgatgagagcgccttttatctcctccaggtcatggcctttgttcatactaaaacatttctggctggctagtggatggatggtatccgagggcaagtaacatcccaaacggaaatgtccggcttcttgtgagcgatctagtgccaagccatttttcactttcgacagcgtgtgcgccgtgcgcgtgcttacttaccgcgccacagagataacaaaatgtaaataccatttgctcacgcatgcagtcacatggtagctaccgagtgagattcctttcgggcccttttgatttggaggaaatacataggaattttagagaattccaatcctatagaaaaattttctatgaagccctttgaaacaaaggattacatcatatccaatcctttgaaattcctatggaatgaacaatcttatagagattttggaggaaatttagcaagagcttcaaccttttactaactttcctttgagtctatctctctcatccaattcctatgtttttcctgtgattcaatcaaacggtcattcctttgtttttcctgcgttttacaatcctctgttttacaattacgttcctatcaaaatcttatgtttttttctatttctacgttttctcaatccttcaagggtccctcagatcggtacctatactcagaatgcccaccatttcaacggggtttttcaccggtttcccagaggagtatgcagcacactgatcttacgagtaaaattcaacgcgttgctacgaattcagtgtactggctccgtgaaattttactactagtactactcgtctagtccagtttggagacaataatcggcatgcattcgcgtgcatgaacacgcaacgcaaactgattaagcacgtacatgcatgtggggacagcagggggctacgcgagtacgcggttgagatgttgaccggggggagcagctgattaaccaggcgtcacatgaacacaggatggttcgtcggggtctaaccttacctgacccaactaacgaaccgtggtactactttgacataagaatgttgttggtgcgatgatggaaaagacttcaactttggaagcttcttgctcagagctgatgagaaggagccctaacttgagacctcgagactttgtgagacctctcaagctagctagatactagtctcaacaagagataactggcgcatgcaagaggagttcaaaactaaacacaaagaatagaacaaggccgagtttagttcccaacttacatcaaaactttcctacacatataaactttcaatttttttcttcaaactttcaattttgacgtggaactaatcacagcccaaatagatcgatgaacgtgttgtgagagaaacgcgcggtacgacaagatatatatacactcaccgataggatagtgacatggtgtgaatgttttcccttaaaacaaacatggtgtgaatgtcgtatgcagctatcatatggaatacaatgatattcagaagtatttcacttataaaatatccagcattttaatttgtgatcgtgaatagtctactgtatccagcattccagctgtatccagatgaaaatgctgcactgcttcttacgcacttcgggttttcggtctgctggaaaatatatgggcctcaagtcctcccaatacgtgctgtatgtacggaacacaactgattcagccctctgggccttcctgaataattgggcctttctttctcaagtcttaggacgggacacgataccgttgaacacgttacagctgggccatcagattctagtttctagcccaatgcttcccatgaatgggccaaatatgagtaccatttataacaaattaacaagaaaaaagtctactttacacctcttatctaagggtcgagttttaatgtcactccttagccgtgaaacggtgtacaacgcactctttattttccaaaaccagtacaaagtagtcccaaggcacaattaagatcggcttaagctgagatggcatgttgactagatttcatcctgcgtgatgtctacgtagcacttatagttagaaaaaaaaggttagacccatatgtcaagagctcatgtcgtctacctccaacctctcctctctcctatctctttcacatctctccccacctctccctctcttaccaatctttatctaggacggtcgtaggtggagaaaggggtggcaaccatcgcgcatctcctcgtataaggggtctgtgttgtattggtgcgacgcgaacgtcgtcttgcgttgcatcgtgaattccatggaggatcacaatatcatccttcttcgtccacaactgttggaataggagtcgtcgctcctcggcaccacttgcactggtgctaccgccggggctagccacaacggcggctgagtagaaggcatggggtggtatggtttgggccaatgtggtattgaagtcaatgtcatcggagtccttgttccatagatgttggtgttggggaggaggcagccacactatggaggggtcgtcgatgatggtagggaggaccagattgggatcagatcagagatggtggggccatcgcccagagtgaggccttcaacttcttggtgcgctcctcttcggcgactcccttgccaacgagtggctccgagtcgtctccctactctttgagccccaaccccgccgaatgtatgcggaactttgacggctctcaacattgttaaggaaccgtttatactgattttaaaagttagaaaatattttgtatctgattttacgattgggggaatgattacgtacagtagaccttttcctttataacacctgcatgcacgccctgctatccggtcagagccaggagaattcgacgtagtacaaaatcagagcctttgccaatcacctgctccgacgaaccaaaactttaaccggacagagcgtcctctaagaaacgggcttttaacatccaattaattgttatgtttgtgggggtgtagcgctggtagtgcatgaacagctaccacgtccggtgcgcgttcgtgcagcaactcgcgcgcggttgccgatttaacccatgattggtgtgcgcatggaaacacatagttatggccttgacgtgacaagcaaaggaaagcaagggaaaaggtcatgcgattggtgcgtacttgttcacggtttaatttgttgcgtcggaggagaggatagagagattggagcgttatccggtccaaaactctggtggcgcccaagagttgttacgttccgtcgcaagccactgcagcaactgtagcttggatgaatggccaaaaagctgatggagatcatgcatgttgtgccttttttttaaaagaaaatgtggaaacaaactaaatcaagtttgattcatttttttttaactcgaacaattttggaccacagaacatgcatcaacatatagtaagattttactctcatttttctatcgaatggtatatagcaatcccgatacaaaggaaattcgtcaaattcatcttttttagtctcttgacagagacgaagaaacgtgatcctctccctgttccggttatctattaaaaaccatgtgcttgaagcgattgtgttattaaaaatagtggtgggttcagctctatcaaggtggtgtcggattatggctcgaatgggcaacggcagaaccaggagtacaagtaatggcccggccaccccaacttgagcaaatcataggtacaaaatcatgtagttgtgtaagtgtaagctgtgtactagacgccaaaaaatagctagttcagcaaatctttccatttcctgctatgctggtattttgcaagaagggatacactcgaaacattagctagccatacatagaaaaaagatcatagcaaaaaaacatagaaacagaaaaaaaacacataaaaagacaactgcaaaacaaaggattataaaatatagtaagaaaattgtgaaagtagttgttttgaaaggtatagcagtatagaaatttcatagcaaaagaaattttaggaactgtaaaatagctgccatgttgattttgcttgtcatttagggcctgttaaaattgataatattttcaaccataccattatttggtaaaattgataattatgtggctacatttagtttattatcaaatattgacaatgtatatggaattttggcaacattatcaagccaattctaccaaaattttggtatattgtcaaattttggtaaggttcattttggcaccaaatgtgaacaaactattactttctctcgtcagtatgtcgtctttgtatttggcttctcatttacctcgatcccgtggaaggatttaaatctccacctaagccctttagctgctagagttttcatcacctacaatcagctatagtgggctatagctgcagctaagctatttagttattttgtaaaaattgaacatgagtcacagaataaacagttcatcacagtagaataaacagttcatcataggaataaaaaaaaatcttgcatgtcttgcttggcggagaggagtgggcctctgtggagtcaggaatcaggatgcagccgccactgttgcagcctccgtgagacattgccaccatcagtgcttgggaaagaatcaaagaacaaagaattgtggggactggggagggaccactgcaacctccgggcacaaccgccgccaccaactccggcgcatcctccgggtgtagccgcagccgccgctgatgccgccaccgcctccgggtgcagccgcagccaccgcctccgatcacagccgcagccgccggagtcgtcacctacggttgcagccgcaactgccgcctccgggcgccgccgtcgccgccattgggtacagcctcagccgccgcctttaggcaccaccgtcgccaccaccgggcgcagccacagccatcaccgtcgatgcaagccgcaatcgccgccattgcctatttctctatcgaggagaggagggggagatagacagagagagagagagagagagggacttagggtttacaccttcacatgagagagggataagggccagtcttagcccgcagcaaattccagcccatcatcaaggtttagctgttgctaaggcgctaactcaagttaatttagcggctatctcccgttaagaccagctattagcgttcgagattctgtagaggcaaaattaggatatcttagctattgctttcctagagatttaaatccttgatcctatgcacgcataatgggaaaaaaatggttggagtgtttttttttctaatttctcccgggaaatgatcccataggaaaatttccttcaactttattgtacctcaatcctgataatcaaaggacactacagtgccgaatcctatagtaaccagaatcctacggttttcatgtggaattcccgtgaagcgatgactaggcctatgtgaaaagctgtctgtcatgctagatgttttgaaatggtccctttttaagcattgatcgatctaaccacctactcctacttctaaagaaaaaaaaagatctaaccacctatttcactatgcacgtatcagcctttgcagtaatgtagagattattatagctgcgtgtggtttctagtaaatcaatccactaaacggtaaaccccccttaaaacaggggagcgagaaaacaaagaaatagagaaattacagtatagtaatgcaactgtaaaataaagtattacaaaacataggcaaaatgtactaatgatcatttcattagaccgcaggaaaactctagggtgctgtttggttggagattgcaaacgtaaacggtaaggacatcagatagcaccgtgattgtaatcagattacggcaaacttagattttgtttggttctcacacgtgggtcgaggggagcggcggaggcgacgcttgattctttctcgtgttgcctctccgtatcgttaacgcttatcgctcctgatcgagcggtatcgcctctgaactgggcctgtaatgggttccaaggtatccaattacggagcgtctcaaacaaacaacgggaaccggatctgtttgcgctggaatcgggtgcgggctgaattttaccgaaccaaacagcacctagaatttaagaaaagacaaagacctaaagaaaactttctatgagatttctaatacttgtattgtaagattcaatagtgtacttagtttgtttcgaagtaggaaaaaaaatctctaggaatgatttttttccaaaattactctgcttttccttaaaacaaagggaccctaacatgttacagataggtgcagcagtactgtgaactactccattcgtttcaaaatataaaacgcattagctttttacacggtttccacttatagtttgactattgattatttcataatatattgtcaataacaacaaaattaacatcatgtgaaaataattttaaatgtgaatctaataatactaaacacaaactatattgttagctcaattattagttaaaaaaatgttgatttatcagaaaacaattacgctttatatttcatatttagagagcgtactgtatattgagagaaatatgtactgtagcactttgatctggaccatgcattgtgatgaataaggcattagatgatatgcataatgcacccctactactgtcctctgccgtagccacatgctacgatagacgatcctatttcgtattgtacctgccactgagacacaccaacctgtatgtatggtatgggtactgcatagttgtgagtgtcaactgcttcataggaatattcactttcttgaatggaactagtaatacgggaatgcaaagcacatatttcagactgctaattaaccaatgcaaaaatgtgaaaagcatacgcaaaatcatatcatgaactataaaacctgttatgctggtattcttctcaacaacccctctgtctgtgaacctaatttggttcatgctttttttttttttggatagtttgctagttaccacagaaagaaatcaacaaatggtatacgggatgttgccaacatcacagcaaaacaactgaaaaagtataatagggcaattgtgaccctcttgaactgaaaaagaagacggtgatgcctgcctggctttctttagccccctcactctgcgcgcactgccacctactgaaccgcaaggaagctggtgttgctggttggggctgaactcgtcgctgccgcagttgtcgccggcacgggtgcgtcgttgccgtcgccgccgccgcccgcagttggcttctggaactctattttgtactgcattttgtcgtcgtcgtcgccatcgtcggtgtattctccacacatctcgtcgctgtccgtctcctccgctgctgctgtgacatttggttcgccttcggagccttccaccttctgtacaagaaacaaatttgattagctcccgtgcaatcaacttgaaactgagactaacttggatcaggtgatttaccttgtctggggcgttgtggacaaggaggggcaccgccagctgcacgttgccgacgtcgttgctgctcttcccctcgagctcacgctggctcgggttgtcctgctcggagacggtgacgatggcgaggctggagtgggaggcggcgatcgtgacgccgccgccgccgccgcctctgccagcgaagtgcttcttgcggtagatggcgtcgagctggtggaagtaagggcaggtcttggagtcctcggggcgccgcttgttgctctccttcaccttcttgaagtacttgttgatgttctcccacttctccttacaccgcttggcgctccggttgtagccgatcctctgcatgccggcggcgatctcctcccacagcgggcccttgggtcccatgtcgttgtactgctcctccttctccatgcgcaggtcgatgagcgcctgcacctcctccttgggccaccgcgacggcgccgtcgtcccgctgccgtctcctcctgctgccgcccaggcgtcctccgccttcgctctcggcgccggcacgggcaccagctgcagccccgccgcggccgcgtcgtggcgggtggcgccggcggacgaaggggagagcctcacgggctccccgccggcgccaccgacgcgctggaggaacgcgatcagcgcggcgtcgcgggacgccgccgcggcgcgctccttggagagctgctcccgctcgcggttgatccgggcgacctccttccgccgccacgcctcctcccgctcggtgcgctccgcctcccacttctccagcgtctccaggaacacccgctgcatcgcgtcctgcttctccgtcacctgcctcatcatcccttcgaacatggccatcagcttcctggtgctgctgcccccttcgccatcaccgtcaccatcatcgccaagcccctcccgaccgccgccgcccggcgccaccgcctcctcctcctcctcctcctcgtcggactcatcgtccgactcagactccgacgacatcgacaagaacccgaggtccgccgccccgggcaacatcatccacgccatcgccagcggctgcgggtcctccaccggcatgccctgccgttgctgcggcggcggcggcggcgccgcggcgtggagcgcctcgagctgcgagaagaagcggtagctcttcccgtcttgccgcccggtgcgcccttccttggtgcgcttgtagtacttgtccacgttctcgaacttctccttgcacttcttgccgctcctctggtaccccaattccgcaagcctcctgccaaaaacaaaaaaaaaaagaagagagaaatcgcgcacacacgccgcgctggctcttgtcagttaattgctcctttgctttcacgcctcaaccatgacgctgaaacgtagtaaggcacgacaacaacaatgaaagcatgtacgaagtggcaacgactacagtctacatacagtatgtggtacgcacggaggtatagtagtagcatctttcacctatcgatcgtagtggcatacgcatacgtacatggatgagtcaagacttgacattctttttcgtctttccatgaaagagactagagttggcggcgctgaattagaattcagcaagaagaggactccctctgtccaaaaaacctaatctattattggatggaacgttttctagtataatgagtttggacaggaatatatccagatacgttgtactagaaaacgtctaattcaaatactagattaagtgttttttttgggacctagagagtaccttctactactagcagttgtactctgaagatgaggactcggaagtcagaaactcagaggagaagtgatgatgtcaagttgatggcatcgtgagagtggggagagtcagaaaaagggtggaaaaagaattaaactatggtgcgagcggcgtcgggatgggagcaaaaggcttccttccttctttttcccaaaaactggagtgcatcgaagtttagaaacgaatagaaaaacacaggtgcagctgccacctcgcaggctgcagctactgctatgtctctgtgtgtgtatgtgactgtgtcgttgccagcagcagcagccgcctgcactccacgagacgaaacgcccacgctgtggcgccatacgccgagatacctgtatcgtccctgcacctaccatattaccagcaggaccccaatctttgccacagaaaccgaagagctactagctagcattacgccaaaagagccgagaaagatggtgctatgctagctaggagacgggcgcgcggtaaaaaagatggcaaaaggatcagtaaactcgccgtcgtttcacgggacgcggtgcttgctactacggggtgatggtgaattccgttagcgagaacagcagcattccggagaggacggcggccgacagcgcgcgaggggggaaaaaattaccgcgcgggttgggttgagttgagttgagttccgtacctggagagctcctcccagacgggcgccttgagggtggcgttgcggaaggcggcgtccatctccgaccggatcctgatgagcgccagcgtctcctcccgcggccaccggttgccggtgctcccgctcccgccgacgccgccggcgacgacgacgtcgtcgaccatcatcatgtcgtcgtcgttggagttgacggcggcagcggggaattcttcgggacccgacacctgcggctgcgtcggcagcaggacgtcacttggagcggcgggcgccggcgtggtcaccggaggcaggtcgaacgcggcggccatggtcggcggcgcggggacgacgccatacggcgggtcgccggcaccctgggggtgctgcatggccaccaccacctttccttccctgcgcaaaacacaaaattcagttgatctacgcacacacaagacagggataggcgatgcacaaaagccaggaactgcagtgctgccttgccactccacaagcaagcattgctgctgctgctgctactcgcgtaccaccaactagcacaccctacgagagcgatttgggcgctgaattggggacaattcttgcctctacgcccatctatcttggcctccgtttccaaccaagagagagtgtggtggtggtaagggagagagagtaaaacttacaactttggacgacggagatgacggaaattgcaaaccgggggggactgtacctaggggaggaggaagaggagagacggtggtgaaaaagatgggggcatggacaactggaaaggggcaaaagagagggtgggagaggagaggcaggcagagaaagccaagagcccctacagtctacagagaagaggggggtctggtacatgtgtacactacactagcccctccaagatttatacacccatccagcaaaaacatgtccaggttccaaaaggaaaaatgttattcacattttagtccatcagattggctcaataaatgttgagagactgggagatggcaccaaatccctccctcgccatattcacatttaaccatgggaagaaagctatttacactttagtgcatccgttttgtttcataaatgttagagatacggaatgcgtcgtatccatctatctcgtgacatagtattgtttgacttaaacagaagtaaatatatgtatctagttccataaatattagagatagtatgaatgatctatgttgatttcttcgataaatgttagagatagcgaatgcatcatatgtccatctcacgatatctccatattttaatccccaaatggaccctttttttatgatttagtctattagtttgtttacggatgccgtatagatggtgagtatatacgccgtatctatctctcatataaatgttagagatggagcaagcattgcatcttctagtttcaaaactatcggatttgttccataattacacatattggaaatacggagtgctccatgtctgtgtttcaacatgaagatttttctaatcctgtggaaaataatgttgcatcttctttcgcgggatacttttcacaaatgttagactatacacgatgtcgtgcaatgttatattgtatatatttatttaaccaacacaaacaagtttaaattttagttcactggttattcttgtccaaatgttattatagggtcttacgcatgtggaaatattattgttagccccttgcgtccattcatcaatggtgatgattggtagtcaaatttgtgaggtgagaagatatatacgacaataaatacaatatctttgatgacatcaacctagctagataattgaccggccatgcgtcacgacaatatgaaatagtaaatgtaacaaaatgagaagaagaaattttggttgaagttttttttttggggggggtgggggggggagggattggtataggtttgaacaatatgaaattttggtcgcgacaatatgaaattgttgtaagagatatgttggaaacatgtactaaattacaacaaataaaatatgtttatgtttagttcattgggtatatttcacacttcttttgtgaatgatgcatttcagacatcttggagatagaagagtagtgtactggtacaatatctatctatctatctatcacctaacataaacatgtttaacttcaagtaataagaaggatatgcatcatgtagacaatttgatatatccaacataaatttcattatagggcatgacatgtaccatctccaaaaataaatacatgagtccaaaagtaaacgtatttaagtaagtcccttgcattcgttcaaaaatggtgacgctgacgcttggtagtcaactttgtgagctgagaatatacgacaatatacaataccttttacaacgctaaattagctggtataattgatcatattcacattatgacaatgcatgacaaacatgatatcattaaagcataatcaacaatggcattctacctctgtagtcctaggatgaagggagtagactcaattgtacattttgtggccaggggaggggaggatgaagggatcacttttacatttcagcatatataaatgttttgctttctccacttctgattctataagttaaaggtgaagggtgtgaagcggtaaaaaaaataaaacaaagatactcccttagtcccgtataagtttattttttagctcctttcatttgtcccaaaataacttcttttttagagtaatcattgcatcgaagtttttaaaagtaaggaataattgtattgggagtagataaaatgaaaaatagttgtattgaaatttgatagagtaggggtaattctagttttttttattggtatatgtgatatgcgtgaaaaatgaacttattttgggacggagggagtatgtcaaattattttataaagagaatgtttaggcaattgttaggcctgtaaaaagtactatcatttatagataaagaattaaacacactccaacagtcacactttgaacttcactaaccaaagactaccacaaattcattttaccataacccctcatagaatctcttgtgaaggtaaaacggagcatatatggataatgacataagctttgtttggttgaggcgagcagatcgatagagttcttttttaatgtatatgcataagtttgttggtggtctgatgctaatgcttatctcgtgttttttcatacttaatcaccaactaattgataagttgtactgtatatatttgctgtaagtaatgttatttatgattttagttcccgcccattttatttttgtatttatttttttttgtataaaaactttcttaccagcattgaaaaaataatttgttttcgtatgaaaacaatggactacattttttttaacatttacatcctaatataaatccatatatgtactaatgttaaccattaagctctaatcattgattagatggatcatgcagtcacaacccaataatcatttttaaggtttctattgccaaaaaaaagatatcatggactcttcaatcttttacttaggcttagataaaataatactggtcaacaccggttagaaactactaattaattctagattttgggaatattgaaacgtgaaagactaacgttcaaagtccaaatgaagtacaactttgtttactaattttgaatactaagttgaaactccaacatgaatacaattagataattattgattccaaacttctcaaatattaaataaaaatgtaaacaacacatataagatatattaggatggattctgaatttagtattttatttaattctaaaatacaaaacaaataatagcaagtagtgagtgatgtgtaatactgttcttttgttcttttattatttttttaatggatactcttttagtctatcagctataattaaaaatataaccaacatatttaacatgaccatgcaaattatattacttatactagtaacctgttattgtcgtggattggcaactagtagaaacctaatacttcaagaagaaatggcacaagatggtcttgagctacgtagtaaatagtactctcttcgtctcaaaatataaggtattatggggcttgtcctgagtcaaattattctaattttgaccaaattttatagaggagagtattaacatctaccacatgaaagaagtaaactatgaaaatgcatctcatcaggatctaataatgcttgttcgatatcgtaaatattattgttcttttctgtaaatttaataaaacttataatagtttgacttggaacaaacaaatatatccttatattttgagacgaagggattaatatgtaaatgttgatcccttagttctgttttgtcaatagctcattcgatcttcctcaaattcgtccaacgtctaaatttggtatgtggtgtttcataaagtactaaactaattaattgtttcatgtatccctcaaagtttttagtttagatcaaaactgtccttgaccctcccgggggcatcagatgaacagtaccagtcaccaaatacactctaatttggtggagcaatcacatgacaaatgcatcttatatatagtttcaatttctaaggtcaatctgatgctactccctttttctttctttcttttcttttgcaattgaagaagtgaaattgcataagaatcctggcattggcagagtctctagttggaaacaatagacattcttttgaaataaactactttctctgagttgataatacttatcgttttgaacaaaaacacgacctccaaagaatatctttgactgctattttctattataatatatataaaaatatgaacaaatgtacgcttttgttgaggtactttttaagaccaatctatactattgcctctatatttgtaagacggatattttgaaaattatttataattttaaagtttgacatcgtacttactaaaacgataagtattatcaatccagagagagtagtttgtcaagaaataccaagatccacattcttcacccatgtacttttgtacctgattcgtcactgaccatagtagtgaataaagtacctgcagcacaacaacaccaggaatggataagctctgctcacaacaaaagtcgttctcgtgcacgttccttgtatataaggggggtgtttgggagtttagcccctctctcccaaacacccccctaaaggtcagctaccgatcgaagcggctgtccaagcctctttgtgccgtactgccgtgttactgtgttaattttggctcgcgccacgctccaccctcttctggttaacgacgacatccccggccgtttcagtacaagtgtacaactcgtttcgatctgccgctcacaccgaggcgcgcgcgggagctagcgatgcggagtacaaacaacacagggatcccaaggggagggaatccgagagttctcgatctcgaattctcgatcgacgacgacgcgagacgcgacggcgtgatcggttgacactgccacggtcgcgtgatccaaggaaacggcacacagcggcggcagcactcagtacatactacgtacgagcaagcaggctgcagcagaggcagcgcctgccgcccgcccgtcgctagcgacagggtgagtgaggtggggggcaaagcaacagtgctagcggcaatggcgcagacgcgcagtggtgcagtgaatgggcacaagtaccgggcgctctgctctgcaatcgctggcagcagcacgtagctgctgctcgggattgccgatcccgtgcagggcctgctgctgctgctagccctgcgtcgcacacctgccgtggcctcgtcgtgccggccggccggccaaagccagcggcaagaggagctcagctctcgtactcgtacgtcgcctgcgcgactgcaacgagcctgtcgatccagtgatgatctgctgcttcttttagaaagacctgtgcccagtccgaagcaatgtatcgatcgagaggacgcatggtggtggatgcccccgcttactttgaagagagagcataaatatgtgagtagtcctggggctccggaagaagatgacaaggtgagagcactggcagagtatgtagtggtgggctccgggaccacctcgatcattttccatcgcagatttggagctcgggcactccacgctgctggtccaagcttagcctgcatggcccccagaccagatgcatatctctctctctctctctctctctctctctctctctctctctctctctctctctctctctctctctctcttctttctgttcatttctttatgcaatgctagattgcatccggcgatctagaaattctgggctccaaagtttcaggaaaggatcgactgtcctaacgctgtcccgctcggttcgaagcgaatttacacacaacacaacgcatgtgatcgctagtgtaacttccacaagatctactacactattgtgttcgagaacaaattaccatgtgacccaactttactgttacggtatggtctcctatatccaattttaccaccattttcaaattgatatgctattgaaaaataaaatttaaggctcctttggaatgaagaaaattcatatggatttaggaggaattaaatccgtaggaaaattttccaatgacaccatttagaacaaaggaatatgattgcaaaattcctacagattgcttcccaacacacccatttcataagaactgagctcatacatcatgctgtatttttcctatgataagtccaatacacattctctcttcctcctactctctctccctctctcttccatatagaacttcttgtaaaattcctgtgtttcaatacctatgcaccatccaaaggcatcaacttctattgtctctctgatttgaaattctataatattgcacaacatgtggcaatctactcctatgttttttcttattcctgtgttccaaaggagtctagtgcttactagcttactgcaaatatttttcatgacaagcctgatgaaacaatgttcactttgcaaatttaatcaaagaacaacattttcgttgccaaaaaaacatatttttttaacaactagccactataaaaaaagattatgcggctctaaacttcccttttcaaatgtgacccaatttatagaggacttcttcgggcttatcccgttatcaaaagaggaggctacaatgtcttctggccaaaggtcaaaaggagacaaaggccgaagacagtacctaatttataacttcgagtagtacctagcaatttctcacctagacctctatatatatatgtatatatatatatatataaatatatgagcgcccatatatcattaacatatggtgacattattaaacgacacattaaaaaaatgataaatagttatatgtttttgcaatatattagcttatctttatcaagtatatctggcctattattgtttttgaactgcatcagccgctgcatgcttgttttcgatccatcaaatttcaagcaaactcatcgaaaacaaaaacaaataagcatcctcacttagttggatgtcccacacaacagtccaatactcggcgtcgtcggcgtaccaaccacagtgccttggggcaccaaacacaattttcgactcgctcatttggaaagtttgggtgccggggaaatgcaaattccatgtataggctagtcatccaaaacagggtttggaccttcgactggctcgcgattagtggatggcaaaataatgggttgtgccccctctgccataaagaaggcgaaacggttctacatctcgttgtcagttgcggatacacaaaaagaatatggagcatggttaggggtggatgtcgagctggctcggctcggtctaactcgttaggataacaagctagctcggctcggctcgttatcctaacaagctagaaatctatgtcggctcagcttgtctgcaagctcgagctagctcgtttagctcgtgagttttagggacaggagagaaattagctggcgaccacagggagaagctcaacctcgccagtgccgcgaccatggggagagcttgccagtgaccacgggagaagctcaatagtggattggacgagcttgagatcgccggcactgcaaccacagggaggagcttgatagtgaaggaaacgagctcgagatcgccggcgaccatggggaggagctcaacggtggatgagacgagttcgacctatgccggcacttggaccacgaggaggaatgctgggggcgagcggcagcgtcgggcatagcgggcgggcggcgacgttgagcgctggggccgtcgggcactgcaggcgggcggcgacgtcgagcgctggaggccgtcaggcgctgcgggcggacaacaacatcgagactcgagcgctgggggagagcggcgcgggtgactggagcatcccacgcgacgtgatgtttgtggtggcagagcgatggagtgaggagagatcgagactcgagagacatcagtattagggtttgctctagtctaatgggcctaccgggcttgtgacctttgtgggctgcttgcttctgctggttacgaaagctcgttacgcctcgcgagtggctcgcgagccagctcgacctgactcgttatctctaacgagctaaaaggctagctcggctcgttaggaaaataaaacgagccgagcggagtcgagccgagcttgtcacgagtcgagcgagctaacgagacataagctttccgtccacctctaagcatggtagctgtctgggtggtttatcaatttggccctagacaataggaggcgacccagaccgtaaaagactggtgggaagctctagcaaacacaacgggagttccaaaaaagggattgcacactatcatcctccttgtcgtttgggagatctggaaggagaggaaccaacaaaccttcgagcataacgaggccaagtcgtctttactttttaccaaaattaaggaagaggcgcgaacatgggcaatgacaggagcaaagcgcttacgtgacatttttgcctcacatagcgtatagagtgttttcccttttcttgcctctagggggctgtatttttctccggctatatttaatgaaaagacacggtctcgtgttgttttccaaaaacaaataagcaaacgtaactgaaaagcactggccataccattcacccgtatgcttgttgtctctcctgtcgatctcctctcggcatcagatactccacgatgtacagagctcagagctgcagacccaatcatcggtcgcagatcgacagcgagttaaatacgtgacataaattgttgcacacgctgggcgtgactgatcactctcccccctccccggcgcggtaaaacggtaaaacgctagagcctcacgtgctattgctgctgccgcgcgcatccgtcgatcgatcgatggttagttggtccccctcccgctcacgtaccggctgtgtcgtcccgcgcgaggctcgcgtcgcgtgccggcgtgcgtcgatcggcaatcgcgcgccagtccaccaccaccactggtttcgtcggtgtgtcgcggacttgagactatctccggcgtgcgtggccggacgcgcccgcgtacactgaactctgaagagtctgaagacgcagcaagggcagctgcatatgcagttacaggatcagatcgggagtgaacttcaggagggcccaatttggcccgtcgtaggccgtaacagaaggcctagacaatagacatgcatggcatgtagtacagacatgccagagcatgccatgtagaggccagagcattaaaccttggcacatactagagagagcttggtggaaatggactgactcaactattcacgtcacgtatgaggagaagtttcggtgggtggacatttacgacaaattgccttttggaggaaaaaaattaaaacaagagtaatgattaagatggtttatacaattattcatgacaaaagtaaaacgtggaacggatggagtaccatgtaaaactatgaacagctatcgattgttacgatctagaacaaatggggaccgttatgcaaaagagcccataaaacgggcctcataatttaccgaccataggcccataatggtaactggcaggcgtacttggacggtggcccagctctgttttcatcggtatccagcggcgcaacaattcttccatacaaacttagctgcccggcgctgctattggcataacaaggaaaaagtacaccggaggtccctcatcctgtcaccgagttacaaaatcatccctcaacccaaaaactagatatatagtatcccttaacttacaaaaccggatcactttaggtccttacggttttaaacccggttttgtcctatgtggcaactgagtcagcgtgggacccacatgggtcccatatgtcaatgactactttctttcccctctctctctctacctctttcctctctcttcttctctacctctcttcctcgctctcttcttggcaaccggccgtgcgggaggactgaggagcgcggctgacgacgggcggggagaggagcggaggtggagacggatgcggcggcggcgccaccggcgatggcctcgccgtcgccttgctctccgctctgcttgacgagaagcaactccagcgctcgcccaaacccaccctcgccgagtacgctgtccggcttgaagttcctcgtcgccgccctgagctccgcgaacgtgaagattcagaggttggggacctccaggatcctcccctccggctccgggtagagcgccccggcgacgccgatgactgcaccgccggctgctcccaggggcatattgttgctgctactgctgctacttggtgatgctgctcatggacgagctcgaccttccgacgtgatgcccggtggcgctgctcatggaagcaaacacgttgggcagtgccatgatgggactacgcctatttgctggagcggctgcttctgctgcgaggtttgaaatttgatcagaatatgttgtcaagaaccaagggagaagaaatgccacaagcatttgaataccttgccagcgtccatggtggccttatgttggtgccctcacggtcgcagcagcttcagcctcctcggagccgaaacagtcccccatgggatcagctgggagcgaagctcgatcaaatcgagttgattattgttcgtcacctcgctgcgtactgaaacttggcgagtaacacgcgagacgctagttgattctttcttatcaatcagtagcagctctcaactcagcatcccgccaatgagagccgccgccgccgggttgggagcggtggagggcgcagcacccagggggacgcgtggccgagcgctggagtcgcctcccgtcaagcagagcggagagcgaggcgagggcgaggccgtcgcctcaccctcgccggtggcaccgccgccgcgtccatctccccctccgctcctctccccacccgtcgtcagccgcgctcctcagtccttccacgcggccggttgccaagaagagagaggaagagaggtagagagagaaaaggaagtagtcattgacatgtgggacccacgcggatgttatatatctggtttttaggttgagggatgattttataattcggtgataagatgagggacctctggtgtactttttccgcataacaaccggtacacctaggttgacccaactcagtcctctccggcagtgttggggacaacgggccgcagatagcctatcaaatgggccgcatatacacgagcatacactaggctttacatggtccgtaatggacaaagcccactaaggcgttcttgcacagaggcctagctcgggtcgccatcgacggcgcccaactcgcccctgacggcgacgattcacgacccgtcgcgcgaacccgccgctgcagctccactcataggccacgggagtcctcgggaactcggccgcgccggtgtcctcaattagatgcaggtacgtgtcctcggtgctttgatgcgttctgttctacggagtactatattcctggggtgtgctttgatttagagctcacacgacgttccctgggcagctgggcttgacacgatggtgattaattagcccaatgtcagtggtgagatagtggtgtttcactgtttcctgacgttaatttaatttatttattagtaaaatccatttggagaagtctctcgtttttgccttaacaagcgacacacgaaccgtctcatgcacgtggagaatttttgccttaacaagcgacgcccgaaccgtctcatgcacgtggagaagtctacaacatgcatgcctttttttaatagacatgtatgtctttttcctcttcaaataaagttttctctcaaattacttatccgatttacaatccgattacaccattatgttcgttacaattaaatcttcacaacaagaccttacatgattatattacgatgaaaaaatatttatatttataaattacttttattatatatgtaagttacttctatctctctctctcacacacacacacacacatatatatatatatatatatatatatatatatatatatatcacaattttcaaattgtgagtatatacctagttataagaattcgattcatacctatacctataaaaaaaaacaactcaaatttaactttatttcacaatccatgattacatacctaactaattatatgtatagatgctatatacctagaatcaaaatctaacaaaaacaagttcaaatttagttcacacttgctttgaactagttagtaaagtagttaatgttaatacctaaataattgaaaaagtttcatactcatttgaattgggtatttactcaatttcaacaatggtgcccgggcaccatggtgctgactaaattatttcttaggcatataaaagtaaattcaataaagtctaaaagtaatttacatatattataaaagtaacttaaaataaaatggaagtaactttgtcacgacattagaagtaaattcgttgtagagataaaaatatgactttatctagaaattaaatttaatcagtacatatcaatacaagtaaatttaacaatttttaaaagtaacttcaatgttaattggaagtaacttttgcatggtttagaaataattctttataaatctgtttaatcaccgattatttttttcctttcattttgtttttcatgttgaatgagacaagaagatacaatctttattggattgtaaataacattgatgaaataactaataagaattaaacatgtataagatgtaatagttacttcctgataactttaaatggaagttactttctaacatgtaataaattacttttaaattaataaaatgtttgaatatattcgatatgaatctcgttttgtcacatattttgagtggaggtacaatgatgcaaatagatcttaaaaacaatatgtaatttaaaatatataagttattaaagagattaaaaaaagatacatactattgtatttttcaagttgaaaggagacactagatggaatacaaaccagttaccactacctatatagtcacgtccaataaaataaaggcatgcattaaaattactttctttttgttataagttacttttataatatatgtaaattacctttagcctttattgaatttacttttatatatctaagaagtaatttagtgaaatctaaaaataatttagatatattataaaaaaaatttatgttttttcatcaaaatataatcatgtgagatcttgttataaagatttaattgttacgaatacaatgatgtaatcggatcgtagattggatgagtagtttaagagaaaattttatttgaagtataggtggataggatctttggtagatgaagtggtagctatatagtcacgtccttatttattacttaggtataatcatatctggggtggtagtcctccaagatcaaaaccggaagtttcaggagtgaaagtaggtccatggtcttgtaaccagctgattgcaaattaaagaacatgagttagatcttaatattagctgggtacccgccactgtaccatggagtaatcgggttacacggctgtctgtgctgcggctgcggtgcagctagcatcaacagtgctgcacacacatgccgtaagccgcagccgtagccaccgcagacaggcagccgaacgctccgtcaagaacttattatatattaaaaaggtttattagcgataaagaataattttatattatattttttagcaagttgaaagtaccaactttaaaaatagacggcgttgaaaatacctttactccaaatttattttttaaaatttaaaatttaacaccggttgattctttgtagagcaaacgatgaggctctctttcaacgctgtgcttttgggacatgtcagttgggtttacttgccaaacagtgatgttgtgacctgctgcaatgcttctgaattaacatttgtcttgttttcacttcctgattttgttcgaaagaaatcttggttcacctggtgaactccgaacaatcagacctacttcccctttgaaacaaagaataaatcataggatttatcctatggaaaataatcatatggaaccctctgaaacaaaggattgtttttacccattcttgtgaaattccaatggaatgaaccattctagagcaattttagagaaaaataagtatgaggtctcagctcatattttcctcttcgggcccctttaaatcacataattaaaaaaacagaggaataggaaaaaaaacatagaaatagaatgacacacttattggattcatataggattttaaaacataggaaagtctccaaattatcgtttgattagcgcacaagaaaaacacaggaatcttatatacatgaagaggaaaacatgaggtcatgcttattttccttcaaaattgctctaataacagcccctttgaatcgcaggattgagaaaacgtagaaatagaaaaacgtaggattttgataggaatgtaagtgtaaaacagaggattgcaaaacgaaggaaaaacacaggaatgactgtttgattgaaccacaggaaaaacacaggaattggatgagagagatagactcaaaggaaagttagcaagaggttgaagctcttgctaaatttcctctaaaatctctataagattatccattccataggaatttcaaaggattggataggattcaatactttgtttcaaaggtcttcatatgaaattttcctataggattgaaatcctctaaaattcctatatttttcctccaaatcaaaggggcccttaagatccattccataggaatttcaaaggaattgataggaaaaaatcctttgtttgaaaggactctatagaattatttcctatagaataaaatcctctaaaattcctatggtttttccttcgattgaaaggggcctttatgtatagaattcctatatttttctgtgtgctaaccaaatgactgttttttgaaaaaagaattcctatatttttctgtgtgctaaccaaatgactgttttttgaaacttttcttgttttagaatcatgtaggaatccaatgagtatgacattttatttctacgttttttctatttctatattttcttttcgaaagagtccttagccaataagcagggtccgtccaattatcgtttgcattctgcttctgtagaaaatttacatcaagcacgtatgtgtgctctctacttggcatgtaatgcctcttaaaaccactctcgttgacactgttgaagatttgtaactcactaccttgcacagtagtactatagtatgacagtaggcaaacgagatacagcaggtcgaaactcccattctctcgtgcgtccggtcagccagtcagcatttggccatttgcctttcccccaactaggatgaaactggttcggatagtttccgtccgtccggactatttttcggattcagataattttggtcggaattatctggaaattctcggattcggaaacgaattcggatatttttttcccggaaacaaaaatgaatacagtataggtactgtccgttggaatcggaaaacggtcggaaagtatccgcagacattgagcaaactttagaaaaaacacgtatatatacataactttttcatacggaatcagatgaagacaaactttatatcaacattgtagagctcgatgagatctacaactttattattgactattttattatttgaggtcatttaagggtctaaatatttattataatataccatattaatttttacaaaatctcagatctacaattcaaacgatatctgatggagatgtgttccatgtcaaacttgtagagctcaacgggatctaccactttgtagtttataacaaagcatttaaacaataatataaatattacaagtttcgaagatgtgaagtaaaataaataacatctccaatttatacaatggtaagtaagttatacatctagtaaaaagatcttgggaatagaaaatgataatcatatttgcatatggatcatttagaggaacaaccatgaaaatcgattttcacatacggttgtgggaccgtctacaaaattgacgatataaatgttagagatgttgaactaaaataataagcgatatctcttccttgatcaagaaactcaatttgaggggttttttatataccggtaaatattttctaccgtattcgttccgtctcgtattcgctctgtatttgtattcgataatattcgatttcatttccgtatccgagttttcgattctgattccgattccgaaaaaaaaaatatgaaaacgaatatgataaagctagttttcgtccgtttccgatccgtttttatccctacccccaactcccttgaaaacgaatatgataaagctagttttcgtctgtttccgatccgttttcatccctacccctaagtccctcgaattctctggtaccagcagctcccttcaacatctgccaccgttgacagctactgtatgttccactgccactacttaaaaaaaggtaattgtaggccggccaaaaacatcttcccagacgggctagcgttccgcctgtacctaaacgattgtaaaaatctataatttttacaggcggtcagctactgtatgttccactgccactactttaaaaaaagtaattgcaggccggccaaaaacatcttcccagatgggctagcgctccgcctgtacctaaatgattgtaaaaatctataatttttacagccggaccaaaagcaccgccggcgaaaatcatttttacagacggcagttaagatctttccatgcgctacagtagccccacctgcaaaaatattcgccgcgcaaaaaaaaaattcccaccagccccacccccctcaataggtttaaaatcataaatcacatattctcacaaatctcatccagaatacaaaatccaatcacaaagatccatacatcaacgaaaaagcattggattcgaattcacatcatcaccttgcaagttaacatcaatcaacatataaacttaaaaaaaaacaacgacgttgtcatcgccgacgaacttctttgagagggaagagccgagctggcgcctctcctccgtccgtcggcttccacaagcggtgccgtcatcgcggcagtcgtcttcgtcgtcggtgcgtcagcgccatcgtcgtcgcggcagtcatcacgcgtctcctctccctacccataggtggcgtcgtcatcgcggcctctcctcgtcgccgccgccttcccgatcctccccccctgagaccggccggcggcgaggaggagagccggcggtggattcggcgcccgaggaggtgaggaggggagccgccgtcgtcgtagcttgtcggcgccgtcgatgttcatcgccaccggcttgtcggagccgccgccgccgctcgaaggtgacgaggagcagagccgccgctgcggccgccctatcctgccgctcctactcggcgccaacgccggccgctgctcacccacgcgtgagggagaggagagggagagagaggagatggggaaatgagtggtggggaggggtggaggagaagataaggatggtggtgtaggagagataagatgaagattttttttgacatttttgcacgtggactatatatattttcgcatgcggactcttaagtggtccgcctggaaaaattgattttcgcaggcggatgacgaaaatacaccctgatttatatttttatagatggacatttatctctgagggttatactcgcctaataaaaataaaaggtcaacgtcgctaaaaatcgtttttctagtagagtgccactctcactgtcgccctgtcaccttttagaatgtcatcaaactagacgtttttgtttgttgcgtgcatgctgcagcgagaggaaagaaaaggctctttggtggtcataggcataacatgcaatgcatggaagcggttaagggaagggctaaaatgcatggtagtaattggcttgctcgagcctcgaagtaggaaggcgaggctaattggaatcggcaagtggatgtacgtgtaacccttttactttaacatgatggcgtccatcttgcacgtcattttcaggaacctgtcacttggtcatcgtgatagatatacagtagtacagatgctaccggacgagttaaaacatcaattgtcaacttgtaggtactaataaatggaagattacaatgcgtcattgtttattttgagattagagcataccagttgattaaaaaataatcttaacaataaatctagacacacatgattttttttttttacggaaagggtatatactggcataggcagagcctgcctttactccagccaaatcgctcgagcaatcgacacccacatagtctgtccaaagtttatgatatcactaactactccggtatgtctccaactgtgatatccatggagcaagacctcgaagtataagaaaatacagtaaaaagatcttacttcatccgttttaaaatataacaacttttagccctcagaattcatcctaaatataacaacttctttaccaaaatttttttcttaaccaatcacaaccctccaccattcacttttctcacctacctccactactcatccaatcacaactctccaccactcatttttacctactttctcaataatcatgtccaacactaaaacttcttatatactggaacggagggagtaataatttggtagacttaggccctatttagttccgaaaaaaaaaacttttcacccatcacatcgaatgtttggacacatgcatagagtattaaatgtggaaaaataccaattacacagtttgcgtgtaaattgtgagatgaatcttttaagactaattataccgtgatttgacaatatggtgctacaataaatatttgctaatggtggattaattgggtttaataaatttgtctcattgttttctgacagaatatataatttgttttgttattagtcaacgtttaatacttcgaatgtatgtccgtatatccgacgtgacactttttttttccatctataaccgggccttagacggaccctagttatacagatgacggtagagtaattcggtttctacagacgggagttcagactccagagacacgagaagtgctccaggagtttttattggacttgttattgttaccgcagccacaaggaaggaaaagaaacaatcgcggtaaaaacagccaattcacttcgtaatagaagttgaaggccatccggggccctgggcgagtcgcgggttatttttatttaaggcccgcacaaccatgggaaacagttgggccgacgcgacgtttacgtgctgccgctttgtccggccaccacccccaccggtccggttgacgaagggagacacgatgctctccagcgccgcccccctccctccctgtggccaccgcgtggttttcgcgaggatcgcacggggtttttccggttttcccccgtgagacgcgcgggccgggaggcgggagccgagccgggacgggaaggcgcagaagacccgcgcggggcgggggggtcctgactcctgacgcggtgacgtacgcccatgctgtgcgcgggacaaacctgacctcgtcacgtcccctccaattttgttcgtctccgaaacgaaacccgatgatgactgcatgcacggcacaggcgcgccagcgaaagcggacacagccacagccacagccacagccacaaccacgcagggaaatcgaccgaccagctagtagctactccctctccctccgtaaaaaaaaaaaaataaaccttgatttccgtgtccaatatttaaccgtccatcttatttgaaaaaattatgaaaaaaaataaaaagataagtcacgtataaaatattaatcatgttttatcatctaacaataatgaaaatataaattataaataaaattcatataagacggaaagtcaaagttggacacgaaaacccatagtttgccttttttttttaagaccgagggagtaggcggctaggcccgtgcacacccacacaaattcatatccggactccggtgcagtcatttttgtaactgcacaatgcgctttcttttaccatcttcaacggtccaaaaatcataatgtgttacttttattacagcactattattgtgccgtatacaacctggtcgatccgatttgcatctattaaaatgcgtactatttccgccccattaaaaacaaatctaatatagaactagcaaaagtgcccgtgcgttacaccgggtgattacggagtgtgtatattgattaaaagtgttgtttggtttagcaatagtgcccgtgcgttgcaacgggaagcgtacaaatcagaaaaatatgcaattaattaaaatacaaattcgctgaaatatttggtatttttaagtaggtatgtatatgatcaaataaatttacaagtaaagcaagtgtgagaaataaaatgacatggttaaatttatttttaaaaaattctccatgattagttacactctttaaaattttattggagttttcagagcttaattgctaattttaataatacaaacatcatttaacaattatttaactaaaaaagaaagaaactacttccttttaggtttaaacatattcaataactataataactataattgttataatgctttgaaaaaatgaagtaccacaaattaacttcttctatttttcttcggcccgagggacctaaagtagactttttttcgtcccttgtcggtcggcccacggccttatgaaaaccctaaccataaccctccccctccccctccccctcctccccagccgctcggccgcctccccactcccgacgccgcctctccccctccccctctccccaccggtgccgccggagcttcccctcccctcccctccgacggcgccgctccctctccctatctcccgcctctccgcctccccccagccggccgtctctcccaccatcggcgctgcttcccttcccttctccctcccttctcgctggcatggcgcggggacagcgggctgcggcagcggtgatggagggttgcggcagcggcttcccccacgctagcggccgcggcttcccacacggcgagcggcggcggtgcccttccccacgctagtggcggtggcggcggcggctctccttcccgtctcgccggcacggcgcagcgacggcggggtgcggcggagacggtggcgacggccgtctctcctcctctccctctccctctccctctccctctccctctccccgtcggcgtcgacggtgacggcggcgacggcggcgtcgacgggcgacgacggcgtcgacgggcgacgacggcgtcgacgggcgacgacggcgtcggcttcgtccgagggtggatccgtcggcggcggtggccaccgcgggcggatccagcagcggcgctccctccgccgcctctcttctccggcggcggtggttttttttttgtaatttttctatcgctattgctaaccgaatagaattgtgtatggacgaaaaacggacgaaaattaggtgtgacgaccggaaaaatacgaatatttatattatttatagatataattcattttagttctacgaatctaaataaattcataacaataaaacatatttcattatttactattttcggtttttatggaatgaagaaagattgattcttacggcaggagaaagtaagtaataagtgactgtagctgattccgaattcggaatcccacacgaaccaccaaccaccgtccggctcccggccatgaaacgtaccaccgaagtttttatgtgttcttgatatttatctgttcttcatatttaagacagagtagtaagtttttttaagatgtcattgtctgtttttatactctctgtccctatataaatgtatttctaacactctagttttatcctaaaataaatacactttcaaattactatatgtgtcccatcaaacatttcttgtttaaatttcacgaattgggttgacatttcaaaggcaatggcaaaagaagcatctctttgacgattggcgaatgttgcggtactccgcagctacttctgtagccagtgacccccccccccccccccccgcgtcgtgtttttccgttcagctgtacggggtaactagcaacctttacttgttttgcgtattttcgtaaaagaatgttaattttttttttcatcttatcccaaccaactacgtttatgaccatccttatttaattggggacatatataccatttatattccctgctaatttggtttcatgggatagaaatgtaccacttatttaggaacaaaggtactaatactttcttttgtgttcagcaagataggttccctaagattcggtgcagttgtgctcgtgctatactgttgtacttcaatttatggcctcccaatgctagctatcgtcgctgtcaggacggcggattaatttgttgaaatgcatgtttaagctgataagttttgtggagggcatgcgtgtacattctgtgttctttccttcagtttcccaacccctctccctcgttttctacacgcacgcttttcaaactactgaacggcgtgtttttttacaaaaagtttctacacgaaagttgcttaaaaaatcaaattaatccattttttaaaaaaattagctaatacttaattaatcatgcaataatgtgtgctccgttttgcgttagggaacccctcctccctaacgcaaccaattacccagtttacgtgtaaattgcgagacgaatcttttaagcctaattgcgtcatgatttgacaatgtggtgctacagtaaatatttgctaatgatggattaattaggcttaataaattcgtctcgcagtttcctggcggaatctgtaatttgttttgttattagagtacgtttaatacttcaaatacgtgtccgtatatccgatgggacaatcaaactcaaaatttttcttcaactaaacaaggccaaaagtattctgcaccacatggttgttcttattgtgccacctgcttaatttcttcttttgcaaaaaaaaagaagattgatcttatgccttttttaacaagaaattgtacggtccttaaaatctaccatgcactacttaaaaaataatttttcatagcatcaccctttcatttttactggtgggttttataaaaatacacttgtgaaaataaatgagagggattccgttaccaacatccagcaaaaatcaattttcgctggtgatcacttaagaatccacttacaaaaatagagatattttaatatgattttcgctcgcggctgctaatggccaccgcctgcaaaaaaaaattgctatattaaaatttcaaccccacctctccccgtctccccaactcctgctcaccccctttctccccgcgcctctcctcctcaccctagcccctctccccccacgcctctcctcctcctctcggcagccaaggcagagacggcgacggtgaacgacctccttcctcgttgagccaccgccgtggagccgcatcgatttggcccggggggcggatctggccgccgaacagcggatccagtcatagaagaggcgcgtgcagacggtggtggtcggcctcctccctcttcagtccagatggtggacagcctccttcctttttgagacaccgccatggatctgcaccgaccggccaccggatggccacgggagcggcgcgggcggcggatccggtcgcgacgacgacggatcctccaacccccttgcctctcccgacgatgcagcgggtcggggtcacctgacgaccgtggctcggtgagcggcgactgcggctcggcgggcgatgacgacggcaaccacagcagccacggtgacgtctgcaacaagctccctccttcgccgacgcagctcgatgacggcatccgacgattggggattagggattttttattggaattttttttgctcgaaaaaaatgttttcgttggcgagtatcttaacattgccgccagcgaaatcctattttcactggtggtcgtcttagcttggccgccaacgaaaatgattttcactggcacgctgtattagcgtggccgctagcgagccgactgcccgccagcacaaatgaattattttcacttgcctttggttgttggcagtatagccggcctccagcgaaaacccattttggctgccagtaaaaacggtttttttaagtagtgatgagaaaccaaatttttaaattttagtatccgtggagccaaattatataataaaaaaatacaaattctcttggtaacttcacaaggtgtaaaatattttttctttaaatttcagaaaaattgcactcctgtttagggatgaaaacggatcggaaacggacagaatatcatattcgtttttatttttttttcggaatcggaatcggaatcgaaaatttggatacgaaaatgaaatcgaatattattgaatacagatacggagcaaatacgagacggaacgaatatggtagcgaatatttaccggtatataaaaagcccctcaaattgagtttcttgataacgaagagatatcacttattattttagttcaacatctccaacatttatattgtcaattttgtagatgatctcacaaccgcatatgaaaatcgattttcatggttgttcctctaagagatccatatgcaaatatgattatcattttctattctcaagaccttttactagatgtataacttacttgccattgtataaattggagatgttatttattttacttcacatcttcaaaacttgtaatatttgttttatgatttaaatgctttcaaatacaattgttataaactacaaagtggtagatcccgttgagctttacaactttgatatggaacacatctccatatgtcgtttgaattgtagatctgagattttgtaaaaaataatatggtatattataatgaatatttagacccttaaatgacctcaaataataaaatagtcaataataaagttgtagatctcatcaagctctacaattttgatataaagtttgtcttcgtctgattctgtatgaaaaagttatgtatatatacgtgttttttctaaaatttgctcaatgtctgcggatatccgaaaaaaaattccggatagtttccgaccgttttccgattccgatggatagcacccttactatattcgttttcgtttccaagaaaaaaaatccgaattcgtttccgaatccgagaatttccggatagttccgaccgaaactatccgaatccaaaaaatggtccggacggacggaaactatccgaaccagtttcatccctactcctgctctaaagtgagggcatataatgtatggtagactattatgactttataacaattatttaaaaggcacaaaaaaataaatattaaaaggttgagatattaaaaaaacattaagaaatgctgatgaagaaagttttttttaaaaaaactcatcatttaattagtagcttgaaaagtgtgtctgtgatactctagtagcatagaaacatcaccttatatcttttacttgtcattgtaagatcggtgcagtcaaaaagtcaaacggtcgacaatatgtttgagactatatattcagattgttatattttttttcctctatatctaaccggatatatacagcctttttttaataggaacccaatcttttaataggaatttagcctatcaaacagggaactagccctcaaataacctaatctgaaattcgctcctattgagatttgaactcaggacttttttttaataggaacccaatcttttaataggaatttagccagatttgaactcaggaccttttttttaataggaacccaatcttttaataggaatttagccagatttgaactcaggacctttttttattgagatttgaactcatgaccttttttttaataggaacccaatcttttaataggaatttagccagatttgaactcaggaccttttttttaataggaacccaatcttttaataggaatttagccagatttgaactcaggactcaggaccttttttttaataggaacccaatcttttaataggaatttagccagatttgaactcaggacctttttttattgagatttgaactcatgaccttttttttaataggaacccaatcttttaataggaatttagccagatttgaactcaggaccttttttttaataggaacccaatcttttaataggaatttagccagatttgaactcaggacctttttttttaataggaacccaatacccaatcttttaataggaatttagccagatttgaactcaggaccttttttttaataggaacccaatcttttaataggaatttagccttatcgaacagggaactagctctcaaataacccaatttgaaattcgctcctatggagatttgaactcaggaccttagggtgctactcaggtcactgcaaccactaggctacatgcccttttacattcagattgttatatgaatacagttagaatttcttttgctcaagatgcattttatggcattataattttcctagataagtagtacagtacctacacattatgaggtcaaatgtaaggcgagaagtactgcacgtactgattggaggcaagacaaattggcttttaggaaaaaggacaaatgtcaattaaatggatgtctcaaatgatggccaacgctcaactggtcccctctagcttattccattaagaattttatagctttccatctcccattcttctttacacctttgtaatctgtggtgcacggtgaagcaaaaaaaaaaaagagaaagaaaaaaagtggatgagcaagggttacaccaaaagattgagacttgagccccatatagagatacttaaagtcttaaaccacataatgttcccatgttaataagattaattagaactatgaatcaacactttttttcagtacacttaactgtgtcagtacttgcgtccctgtacagctacgtagtacgtcatcagttgaagatgtgtgtttcatcaactttttccccctgtgaatctgttgcccatcccaaatatgacctcaaaaaaatgcaatgatttcacctatgataaccccaatcttctctgttctctccgccttttctctctcctctctctctctctctatctctctacctctttaagataccaaacagaccgtcatcgtcctccccatccctggagttctctccccccttgaaacaagggagaggaacaggagaaggatgagagaaagaatcactgcaaaaagggagaaagaaacaaggaagagaaagagagaggaagctttttcactttgaggggaatgttgtctggctcgaggtgcatggagaaacctctgatcgatcaggtttgatctgtagagactgatctcggaccaggcttcattcccctcaagtaaagctcccatatttatttatgtctcgtcgatcgatcgatcgatctccgcggttcttggaccgcatgcatacccgagattttggtgagtctctgattggacatcaaacgattcttttcttgggcgatttcttggtttgggcgtgcgcaggaatcattagggtatgattatcccggcgaatttctcgctccttgtgttggttttcgtgtagtatggcatgcagattggtgtaatcatgaactttttgacacacagatgcctgaaagctttctcctttttcttctctaaaatatgggcatctatcttgtagttgcggtctctctttaattcctgtttgctttttgatatgatatctaatctggtaggagaaacaaaggggaaaagtttgctttttacatggaggggacttactatcttcctttgattccatcactttgcatccacctattgatttcgttggtcaaactatatgtacagtttaatatgtttcattcaattgtactgtatgtagttgtatcatagacacgtacagttatcaaaagtactacttttgataaattgttgatctaacaactgtttcttgttccctaagtttacatatacgacgcacaagcgaaactctcaaggtattaactcgtgatttcagagaagtttttgatgtgtttattgttcaagtgtggaagaagttcatgaggaacatatacagcttttactcatacatttaatttcttccttgatgcacataaaacctctgtctatatatattatctgtgcagatttgttctttcaattcagaaggacaaatgctataaagcattacaggtaatatcataaataccatccatgatctatatttgttcattcgttttggtagttgtcttctcccttttgtttcttcatccattaatacaggacacatgcgactgatcatcttgtctagcgagtagacagcggtaagtttgcaattttatctccttgcatgtgctattccaatcaagttctgaaacattctatgaatgtataccacggtgattggagacaaaaaaagctagggaccaaatgttaatgctgctttctgaatagctagcagtgtaacacaagctgaatcctcaatgtacaagtaatttatattctttagctatctaggaggtagcctaggattctgcatatatagaagatagtgtgcattatgatggaaccttcatgcgtatatacatataatcatttactgagatatatatgttctgatgagcattgagctaagtatactcaacatgaatataacctggcaggctaattaatataaattcggtgttctcacaatgttgcattggagctatatgtatagttgctaataattaatccaccaatgtggaaatgaggatcctgagctggcatacaattaatctatctttttttttctacttcgtgtagtacactagtaaaagtaggcagtgctagctgggagtactcctctttcacaggtcttgtgtttgtttcggggtcgggatagaaccaattcatgtgtcatatggcaggtaatggtgaatttttctaggaagaggagacaagcaatggcgtggtttcatatatgtatataacagatgtcacaggtttactgttcacgattatgtctgaattgccagaagtgcatgatcagtacatgcctgtaagatttgtctcgtcatgacctatttatagctgtcatagaaaaaaaaactacaagacaacgaaggtacgtatgtttgtactgcatattgttaacaagttaatcaagtttacttttaggcgttatggggtacagctgtagcttcttgttggtctagcattgatcaaccattcttagcggtagtcggtttgttactatactagcccttttctcagtagtgtgggaaggcgtcagtgcgtagtggaggtgttttttttttcttttctggactataacctcctagttgtagttctgtaatttttttttcttgttacatccaatgaaacttcatattgtctaagtgtcggttcattggaagaaaacatcatcaagtatacttttatgttgtgaaataggagtagcaaaactgaggaaaatgttcctatcagtacaaataagacttcaaagatatagacttcgaatagttagccatgataatgtgttgcatatatacagttcgtttcttatggaacatctttgcatcttgcatgtgtaatgagtcatctgaaacggcgcgttactgtccatattggaataccaacttgcaactttcattcattatattcgaaatgaaagacattttaattgttttggggtgcaatatagcactggcaactaacagtaatttgtaagcagtttagcttgacagacaagtgcacgccattggaattatgctgtaattgtcttgtgcgaagtaacttggggcaagaaatagttgggtgcaccaaaaccgaatgagctaagcatagcgatggttcatgttgtccttcatatgtgaagtacttgatggaaagaaagatgcaagctctattcaatgtcttcccctatttatgccagtttatggacacacattggtaggatgggtccaaagaacataaataaagtgagggaattgtatccacaccactgagctaactgcaagtacgtagattcagaaatcatctttagttcagaaaatgcagtagctttaatacctgtgccttaagaacatttagatagcttacttcaccaggcgggcttattcggattagagaatcttcacatgattttcggatgaacactagcatgggatttttttcatcatttcctatcgttcgaatcatgaaaaatggttataggaaatccaaagaaaagtttctttggctgtgtttagctccacgtcaaaattagaagtttgactaacattggaagttggaagaaaaaagttgaaagtttatgtgtgtaggaaagttttgatgtgatggaaaagttaaaagtttgaagaaaaagttggtaactaaacttggcctttgatgctgatttcataagaaaagtacatgaaaaatcaaacgacctcaaactctttttttttccttcatacatacaaatcctaagcaatcaactttccgtggtccaaatgtcctcaactcttttattcatttgtttttccatttctttcttttacgtttagattcctattctattcctatacttattctatcgtatgttttttatattctataatccgaacgagcccttaaaagtggttacaagggtgttctctctttcttgatctctcgtgcggggttgggcagattgttggtataaacatgatgtttttttttagaacatgatatatgatcagtgaaacaaaggcaaagaacatgatatgacgagtgatgagatgacactagcatatcaccgaatatgcaatgtccaatcttatctgcaataaaaagtacgcagtagaagttttttgtgtatgcgaaccgaacggcatacgacatgtacgaagagcgtgacatacttgattttcacgacacggcaatgtcttcttacacgtacaagcagaatcaatgctactgtaccgcataaaagaaacaattttcattctgtcctttaatatttcagtcttgtacagtattcttgagtacgtattagggtgcaccaagaagcagcaggttcaacgtacccattgacagcgaaacgtctgtggtgacttcgtcgatctccaggatttaccggctcagtcttcgaagatgatcataggaatagagtatgcgtacatgcgctcataggggtgagtgtctgtattgtaccgtgtaattcttaaaaaaaatccaaggaattcctacaggtacacaggcacacagctgacagctccttgcagcccttgagaaaatttgtttgtgtccctttcaggctttcatttcagcagtacctgctgcaagcctctctggccaatactgtagtgttcctgtgctttggggaggggccggggaatggagaatatgaagaaccttttggaatagatatgtgcctgactagtttgtgcttatctgatgctgctctactttggctagcccgtcgcttgtgccgatgggagattcaggttcaggcccactgctttttccatgggaagatggctactgccagaagccaagctgacgactgttctgccggtgatgttgaaatcagctgctggtgttgatgacaaagttattaactgtatgccctgatcactagtgatcggtatcctggtcgaccaggagggttgaaagccagaaaccatatggtccatgaccatgtttgatctacagtcagaactcagaattagctgaaggtgtatatgtagtggcgtcatgtagaacatgaacgatatgaatagaaacaagcgttggcagtagcttcactcaggctgtgttcacatgcaccttttcccgtcccctctccctcgttttccacgcgcacgcttttcaaactgctaaacggtgtgttttttgcaaaaaaaagtttatataagaaagttactttaaaaaatcaaattaatctatttttttaaaaaaattagctaatacttaattaatcacgtgttaatggaccgctccattttccgtgcgcaagagttaggttcccatctcccccatccgaactcagcctcagtgtgattctgaagaaaacgaagataggtgcaagtggtgatttgctgttcggttgttttctttcttggcagctcagcctttttttttctcctctctgcagttatttgttgcatcagacagctctcgtgttgatgttggtgtgccagttttttattttaatattttttcagcggaactccacgcatgtctctgggccggtttgtcgtcgaaacacaagaggagagtgaggaataagtccattttgactcccttaaaagtgatccgaatctaatccgtaaccttcgaccgtaaaaccggataagacgactccccaaactattgaaactagtgtaatttgactccctcagcggttttggagggtggttttgctgatgtggcgctgacgtggtaatgttgacatacttttcgtcccacatggcgcttacgtggtattagaattttaaaaaatatatgtaggactcatatgtgattcacaaaaaaaaattgacatgtgggaattggctggtacgacggcgcggcgagcctccaaccaagcggctgggatgccgagaggcggagcgaccgacatcccgtagagcaccaacccattctccagcgaccctccctccgtcctcgcctgcaagagcgagtgcacacattaaaacactcttcctgactgagcttgtgcagaaccgagctacgggaggatgatcaccttgatgtcctgcacaatgaacgggttcgtctccacgagcctcgagcaacctgagccgacgacgactagctccggcgagccgtagtagtaccccaacatcaacgccgccggcgctgttccatcaatgtaaaggatcaaagcaagttatagcaagacgtagtatgtgttgtcgacaaagacaatcttgatcagagattcagagtaactgacccaagaaacagaaggcggggagggtgacaaagcagcgcgccgctgccgccatgactgtaagtcatgtacccttcgcggcgccggacagcaagacgacgcgtaagagaagctgtgaatccttgaacagatcacggccacgagggatttgtggaatcggtgtcttagctgatgtctcccccttttctcttcaccttctctctcgtggagcaatcgacgggcaggggcggcgaaagtgggcgggagccggagcggcggcggcggcaggcgggagggctggcgggcgggcgctggagtgtgtggcatggaagctgccccatgcggcggcggggtgcgcggggaggcgtgcgagcacgctgacatccttccgattcttctcgaaagtcggagcagggtttctccctatctctgccatctccggcggaatcctgccgatcaattggttgtcggccaggttcatccagagcaaactgctgcagttccgccgccgtcgccgcttcaacttccgccggccgccaccactttggcccctgcccgccgccactccagctcgtactccccgcggccggccgaaggggagagaagagagaaaaagaaagagagaagggaggaagaggggaggaagaagaaagagagagaggatgaggaagaagaaagagagagaggatgacacgtggggcccacatgtcggtggatctctgttgacgaaaaaattgaacacatcggcctgggagatctgcttagctcatgtgcaggtccaaatcttagtgagatgcgggcgtgccagtcagtttgatcctgcaactgacaagatatgcaaatagtagatcaaaacagccgatcggctgataagccgatggagtagttccagccgataggcgataatagccgatgccgataccagccgatagcgatagagtttaagcaatcggctatatgtccaatgtagataatgatataaaggcaatcggctaatgatgatgtaatgaaataacaatataatccagtataaaccaatcggcaaataatgatatgataaataagcatcgatccgaaggttaaagcatacatcggctgaaggtctgatgtcatgaaatccacaagattagattaaacagtgaaacctttgttgtcatcggctaaatccaacttatatgtatatgcaatacttttgagccgatgcaacgtccaaataactcaccggctaaaaccccgatgaaatccttattggcaatcaagaagcaggccagagattatggttctaagcacgacttaggagatcaaacttaactgatgcaacactaagtatgaaaagaaacataatatctagacaatcaagccgatgactgattttcagggaggtagatgcctaggctaatctaatctagcaaggcgatttagccgatactggcagaaaccctaaagcgagagacagccgatagagctaaattgagatgctaggactagattaacatagacatatgataaatagccaggcaaatatattatccaaaccagagtaatccaagaggtcaaatgtcctgatgcagccttgaacgacgccgacgtagacgatacaattgcctggaccgacggaacattggacttaccccttagccggagatcgaacaccgatgcagccccgcgtcaggtgccaagttccgccaatcaattaaataaagtagaaaaggtaaaaggtggcgatgcgccgaattgtattgatcgtgaggatagattacaatgaccccgggtgtacatattttagtattgtggaagtcggccggcacaaccgtttaatcggccgtcaaaacggaaacggtagccagaccgtaccgtatcatcaagtcggagctgcatgaccatttcagagtaattatgcagtagtatggcatgattaatgggttatttatcatcaaatcagatgtctgcttattgaactaacataaacttgcaaattgcagctcagctgcagtattttgactaacaagcccaatgctattgcggtactaaccatcagtattgatatctattgaactaataaatggtattttcaaaatatagttagagatttatacaaatacttttttattaagatgatgcgttttgtctccaccgttgccattaacatcaattatgtacatcttagtgcgaacgccaaaaatccgtacaattctgtttaatcatccgtatttcgattaatcgcttgacggcacctcgtccgtctgacacccgtattccgttttccacaacactgacatatttatacccatggatagatactagtccttgtaggacaagaaagaaacttttctaaagataaaaggaaaacataaagtcctaatcggacactaaacacactttcctaaagataaaaagaaaactaatagactattcctaattaatagataaattgctatgctgcatcctccttaaactcggtcacttctggataagctcatttaatagattgatttccttaaccgaatatagcaagaatccaactatggcgacttgatgacttccatcggccgattccaaaactctgaagccgatactggctctaggccgatgatgacctcggggctttaccaaatttcgctgttaacagtctcacaattttttatgcatgtgaatgacaaacgggtcccacgtatacatttttaattcaaatgccacctaagcgccacgtcaacgtacagactaggtcaacaccgccacatcagcgaaaccaccctctaaaaccaccaagggagtcaaattgtaccggtttcaatagttcgggggtcgagatatccggttttacggtttagggttatggattagattccggtcacttttaagggagtcaaagtggacttattccgaggagagaatgcgagggtagcggagcctgtaacaagggaagggccgaaatgaatagctgtgagactgaaggcccaaactataattggatgatcgcttaccaaacaggccaaaatgaacagcctagcccatccaattttttcatttaagaagtaaaagccagaaatataatccattttaaaaaaattggactttgtagttaataactttttcatttaagatgttttagatatccaaatattcgttacaaaatataaaatacattttaaaaaatctcagatctacatttcaaacgacattggatggagataaactttatataaagttgtagatcttgatgagatctataactttgtagtttatcacttttccatttaaaatcatttggagtatcgaataagcattattagtttttaagcaattaaaaccggtgggaagggtttgaacacaaataaaaattttgtatttaggtcccttgccgccctttgagagggcgatttttaaatatcgcccttcttaagggcggcaggcaattagatttgtaaattttcgaaacaaaaaattatttttgtaaatattttaataaaaaaatgtataaataaaaaatcttaaatgaacagtccaatttttttaataataaaaatggattatatttctggcttttaccaaagggcacaactaaaaatagttattagaagtaaaaattaaacaaggtgatgggagaccctcccaacttccgctaataaaaatatcaactaaaacaaagtttgcaaaactagcatattgcttgcaacaggttttttttccttgtctaatatattggtatgatgctaattttgttatcatttcaaaaaatattaagctccataatattatattatcattttttttctttcgacgaagtccatggcatgtgagggttcagaaacaagcaaagtttttgcctcacaactcgtagatctcgcatgatagttgggtggtagtgatggtgacagcaccacccccactaccatcttttatatttagtacaaatatctagtccaaaattatgtaagtactactatcagggttatgtataagatatacctcctattcttgaggttgtgaggtatacgaatacggtatatcctcaagtacacgagaaggttgcccaccagatcaacgaaaatagccaatgcgcaaggaatccgtctccctgaataaaaggtgttagggtcctatttggggaagataggggatttatgatttcttacataaaaatgtatcttcaaattctacttggagaataaggtaacctgtggtataaatacatgacccctagaggggtgcagggtatcgaatcttagcgcaagacgcctgccatagtagaagcaatccagaggattcgaagccaactggccggtggatctcgtcgagccgttctcgacatggatcttcggtaatctcggggtactagtgttctctgttgtaatctccgtggttttctccataatcccatataaaataggttaggtctattacctcacgagggacctaaaccagtataatccttgtgtcccgtgtgcttgatgtcgtatcgtatagatcctcgtaccaacgtacccctataccatcataatacggactgcaggtatcacccatcgacaactacgtcattcatactagaataaaagattcctgcctactaggatactctctccgttctaaaataaatcaatctcgtaccagatgtgtatccagattcatcgtactagaatgtatcacattttatgtccagattcatcgaactaagatgtgtcacatttggtacgaggttggtttattttgagacggagtgagtatgtccttaaattaatgtttttaaacaacacctcactcgcttttatgcgcatagttctcaaactgctaaacgatgtgctttttaaaaattttaagtgaatttcacaaaactacagttattttgatgaaattatcataaagctacatttttaaggcattgtttcacaaaactacatatttaacataaaatttatcacaaaactacaaatttaggaccaactatgataaaactatagatttaatactatagttatcacaaaactatatattttatagcttaaatccctaccactactactatgttagagtgataaatgttgtagttttgtacttaacatgatgcaaaacatgtacaatagtgataattttattactaaatttgtagtttagtgatctttcaccttaaatgatctatagttctttgtagttttatgatagttttgttaaaagtacatgtagtttttctgaaatttgctcaaaaattttctatagaaaagttatttttaaaaatcatattaatctatttttatttttaaaataatacttaattattattcgctaatgcacatttctttttcttttgtgtactgaaggtcaacccccttcccgaacccaccgtaaatgtgggggaaatttaactatttgccactcttgtgacatggcaattaacgatttgccacaccctgtcaatgacacgtgggccctcatgtgtctatgacatgtgggtctagtggaaaatcgttaagcaccacttgtaagagtgtcaaatagttaaaagcctctaaatgtggagcagcccaactaattataaattttcttcgtcccacgaaaacgaatctagaattggatgtgatgcattcttatacaacaattttgaacataggtatgttcagattcgtactaatagaatgtgtcatatccagtggtagtagattgtttttatgggacgaagagagtagtgtgccataatgccatggcgatcaatcaatcaccaatgtcagatctgcaaatcagtgtcttaaaaaaaaactgcagacgagaaaggagtgccaagtgactcataaatcataaacggtcacactccagttagcaaaaggtctgtgcaccgcgaccgcgagatacgtgttgccgacatggtcctatcagtgaccagataacaattctctctcccggctttgaacgcacagataaaaacacgtacgcaaaaacaatccaatcccctaaaggcaaggctctcgcaaaagctaaacccaatgcctacatacatgcatccgcccgccagtagtagtgctcgccaagtaagttgctagctactccgacttgataaacacacacaagaacacacacagtgcatatcggaaaaaagcacttgcgattgcgagttgcgacgaggcgatcgaaagctttgccgatcgagcgaaaacaaaagcggttttgtccgcgcggacacgcgccggctcgctcggcctcgccgcggcgtacgtcgccatcacgccgtcgacgtcgcggcgaccgcaccaccacccaccaccccgcgcacgaggaccgcgagcgcgacgctgacccgggcccggcgcccctgcgcgcgcccagccacgacgggctggctaatcactgcaattatcccattaactacgggcttatcggcgacaggtcatccttaatatatcgggtgatcagcgtgtcgttgtgaactgtgacctcggagagccactgacgtgtcggctccggggacgggacgactccgcggccggctcggccgcgcgcgcaagcaaacggtgagtacgtacgcatgaagagagtattgtattgtagcattagttttatgttaagagtgatttggtttgatgttagtggctgcgactacgtttccaggggatttgtggctgccgaaacggcaaaggcagccatcagttcgtttccccctacgtgagggatagatgacacaacatggtactgatctcagccgagccgaccaccgaacgaatcacgtgcaggagaacctggcatgctaatcgtgccctgacatgtgtgccaaatcatatctgtcgataagcaactgcaaaactgtaaactaagaagatgtttgggacagagggactaaactttagtcctctctaaaaaaaataagtccctagagagagccctctcccccaaacacctcctaaagcaagcgaagaagctcctagctgcagctaacctgcacggtgaaaattgcccaagaagctcactgggcgcgtgcagcggcgattcgaccatctgttccacgcggagtcactcctgggacacgtaacgccggggatgataagcttatctgacttttgacgaccggtcctagctaggagaaggtacagtgcgtgtatactctgcttgtcctgccgagccgggaaaaaaacgctagcgtacagcgacgcctcatcatccctccctcgcacggccacacacccccagatggttgggagccctcacccctgcaagatagtctcacacgcgagcccccccagccgctgcaacgtgacaagccaccccctgccacctcggcttcccgtccgtgagacgctctccgccgcatggcccagttgacgtggacgctgcccacctatactactacgcaccatggctgatggctgctgcacattggcaatttggaattgattttttttttttttttgcgtagaggagatgaggaggtctcacactccaagctcgcgccacgtgtacggcgagagctcgaatcgatcgcgagacggataaccatccgggggagtgtgggggctccgatgcgggacacctggcgcgggacaaaaggcgaggtggggcccacgcgtaccagggcacgagaccgtggtgccacgtgtcggcatcggctccggtataaaaggtcgccgcgcgcgccgttgttctggaacacacacactactgcgactgctagtgctctggtcttacattcgacgaactgatcgatattcgatacgacgtctcctcctacctggagcttgggaaaaatggagagcgactgccagttcttggtggcgccgccgcagccgcacatgtactacgacacggcggcggcggcggtggacgaggcgcagttcttgcggcagatggtggccgcggcggatcaccacgcggccgccgctgggagaggaggcggcgacggcgacggcggcggcggcggcggcggtggcggggagaggaagcggcggttcacggaggagcaggtgcggtcgctggagacgacgttccacgcgcggcgggccaagctggagccgcgggagaaggcggagctggcgcgggagctcgggctgcagccgcgccaggtggccatctggttccagaacaagcgcgcccggtggcgctccaagcagatcgagcacgactacgccgcgctccgcgcccagtacgacgccctccacgcccgcgtcgagtcgctcaggcaggagaagctcgccctcgcagaccaggttcgtgcgccattgccgaccaatcatcagctatacctgctgcatacgtgcacgcatggtgacaatgcgcgctttgccttcttgcaggtggatgagctgagggggaagctgaacgagcggcaagaccagagcggcagctgcgacggcggcggcgccgaaggggacgacgacgacaagaggaatagcgtgatgaacgcgagcagcagcggcctcgtggaggaggactacgtgagctgcctcgcggtgccggtggtggacgtctcggaggacggctcggcggcgtgcggcgggtcgtcgtacgagtacgaccatcacctagactacttgggcggcggccagctgcccgatccgttctgcggcatgccggatctgtgggagatatggccaatggtggaatggaacgcagtagcatgatcatgctaatcaatcagcgtagcatacagtatataaatatatatgtgtatgagtacgtgttgtattgggtctatatagatattttgctgctgttgctgctgctggcttgtgcagtcagttggtccggagagatcgactagagccgcggcgctcgtaagctagacgggagagcagattagagatggaggatgcaaccggccggccggcaaaccatgcaacaatgcaaatccacacatgcattgcgttgcacagatagaaatcctccggccggtcgatcgccgagtcttgctgcttgttatgctaggatgctacattaattattcatgttcgtgaatctggctcccctgcctcggagcccgttcgtgcacatatgtgaaacatatatatcaacgctgcgcatgtgtgccatgcccatgcgcatgccggcgcttgtcgtccatgctttgaacgttattgtgttcgcgcgcagtgaatgttactgtaggacgtgcagcgaccgcaccgagcggcggagggagagatcaacggagaaaacatcgcaatcgttggcgacaaggtcgtactcgcaccacaggagatgggtcgcgttttcctcgagctcgtttggaggttagcggtcgatccgctcggcgtggcgatcgactgttcgtcgtcccgcggcccgggcgctgttgcgcgggggaagcagagatgcgggggcaggtgtctgtcgcggagagagatcgacgagaggatatgctgcggcgagcaaggagcaactagcgaggattaagaaagttctggatgcgtgtggctgtgccggcggccaaatgtgtggtggaaaaccggaacgatcgaagcgagccagtgggacatgaaagcgacgcgaggccaaatgagaagcacgaaaaagacgtagcgcagccataggtgctgttgagctcttggaatcgagggcgctttgcgcaggactaagagcaagataatagtagagctaatttcctgctattagtccatcttaggacccctttgatttggagaataaacataggaattttgaggattccaatcctaaaacaaaggattaaattctatcttatcctttaaaattcctatgaaatggacaatcctatagagattttagaggaaatttagcaagagcttaaatctcttggaaactttcctttgagtctatctctctcatccgattcctgtgttcttcatgcggttcaatcaaacggtcatacatgtgtttttcatgtgttttacaatcctctgttttgcatttgcattcctattagaatcttacgtttttctatttatccttttttttcattcctacgatttaaatgggcacttaaagccaacatatataatagattagcaataaggttgaccacaattttctactcctctctctattgacacggtttccaaaacacaactttgacttgttatttctataaaaatatttattgaaaagtgatatatgtatacttttataaaagtatttttcaagacaaatctattcatataatttttacattttcaaactcaacaatttaagagttattcatgatttatattcccaaggtttgatttaaacattattctaaacgacttcttttacgagtacagagggagtatacaattattgtatttgtcttaaaacttgtgttaagctgctcttacataagagccaacacctttgattttttttttcttacctgtctccacgtaaatttatagtaggcttataactcattattatccttgctgttgtaccgagctcaagccattctgagaatgagatgttctaccatgatcttagtgttagaatcaatatatagaatagtaggcttgtttggtttggagccaatttttaccttactaattttttatagtgttaaaacctcatcaagttttgacactagtatagaacttgttcggtttgaagataatttttgccatatactaagattttagtgccaaaatctttcaaccaaatttggtaatatagaagttgaactagtatggacgtgaaaattggcagcaaaccaaatatccacgtggtaccattaaagttgccaatttttttgtaaggtgcaaattagcttcaatctaaactagcctatagatcatttctatggatgatcatatgatagtactatatctaggaatagtagggtatgtaggtacggtgctcttttggatacattttctacaggcccggtggttgttggtgccacatatggcctataggagtattactatgtggtgttatctgcctatctatgaactaataattacatatgaatatcagggccgcacttgtatagacgtatagttgtaggatgtatattaagaacacgatcgatatactgtttataccgttttatacagcacgtatcggcaatggtcaatacggaataaatattaaaattagttgaacaggcaaagcccataaatctgtaaagaatcccagactgcaggccgcgacaatatcgtcacaactcaataacgtagaacctgcacaagtaaagcagaggcagagcgaacaatattcatcaaactattgatggaagaacagaaaatatttatacttaggaacaaaactaggggtgcatgagatttgatcatgtacctgtcatcctggagcactgtagagcatctcgacctaacaactatgtgcacaagacatgcctagtgaatggaaaaatctggcaagagaaacgttactatcgctgcacatgcacggagacatctggggctgacgtttgtgtaacactctgctgctcatatgagatgctacccttggtactagagttcttttcgttatgaacatattctaaaaactccattataattgggtcagtccaagggcatccaaatggagcatcttcacctgccacccatccaaggtgaccaccctgtggtgttactatcagtaggcagttcgggttcgcctgaaaagataaaataacaagattttcttgagtcattttagagcaacacagagcagaataaatacataactattgaatgaatcataagttacaggccttcagttatctcagtgtaaaaggtaggtgcagtaccctattgagttttctatcctatcttggtaggattcatgactatcttggtgatgtggaaaaagaaagatcgactctccaattagacgcattagactatggcattacagccaaacccaaatttgttgtctttgttgtatagttcaattcactcattaattaataaaacaaaaccccccacataagagtacctgaatcccagttagatatgattctcatttcagttagcacgacccggaaattgtacttttaatcaacaagttacagtacacagaagtaacaaagttctacttttcaccctttggatctgcatgcactcttatttgttgacttaaaacagaactctcatgaattagactcggtatgctggcctcatgttcttatgcaagagatcaacgctgagtaatagggtccagtagggtgcatactacaaagtacaaactgcaacaagcgaataccttgatatcttctctgggaattcccctagatggtgcaattgggtcattatccgcctgcacataattaagcaagaataaaaaactatagcagaaaatatctaagcaacccttaatatgtgattgtacggcctaattgttttctcttttttgagagagaaagccaaattgttttcattgtataatatatgaaccagtactgacaactgaatacaaactgttgagcattgaccttgttttccagcatgtctatggaagtacaaacagatctaactacttttaaagccttcatgtattccttattccatgattgctctatgaattccatagtgccgacttgaagtaatgtgtgaatggaagtgcaataccgtaactattgtcatctagaattattgaagtaatttgtactatattggcaagaccaaggcaagcaatcaaaagtttttttcccctggcatttcaattacacaattaagtgggctgtgtacatccattgtggatgtagaggccagattttaatccattttctaaaaaaaaaattacacaattaagaggccatgagttgacttgcattgagatactcctgctctatttttgctttacaattttgactaaatatttttactgttccctaaggatgacaaaatgatactatcaaactaagtaataagataattgttgttcctaatgtgtgagcgaagcatatagaactagtagtttcacctgtatgcacaataagggtatggaaacattttttatggaatctgagctgcttgagttggagtaataatcatccacagacttgaagccaaatgaaactgcatacaattgaagtgtaattttaaatgcgggtcccaacagagaaaaaaaatgaatagcatccggtaagagttatgcttgatgtcatttcaaacctcgggttagcccttcatcaaagtctctaactgatcttgcattcgctgcctttggtatattatattcaccttccaatccttcaaaaagaagtgcatgcctaaaattttatgaattccctaaaagtcaactgttagaattcattgaaggagagcagtgtaatttagatttgatgaaaggtgaacagaagaatacttcttaaatatattcctcagagccttagcaagggctctgtcatagacattgttaaatcctttgtggaaatcttcatctgcaattaccaaatcgaatggattgcacaaagacacagctccagaaagaacacatttatcagtttcctggaaagagaaaacatatagctgtaaagtttcagactgttagagtaaagcgtgccttgggatcaattctatataacctaatgcagaaaaaaaaacacatatcaaattattaggtgataaaaaggagcaagtccataagtttaaaacatattggattaaatcacacactgaatcaaacaaaagtggcacatatataggtcaactcctagtcatcatcagctacaaaaggtagtacataaatcatatgacttcaagatgaaataaaccctgataaatatggcacaaggaaaaaaaatgctgttgtgtagaactgtaggctcatcatcaatgagtaaagaactcacctctccaaggtagcgcacaagaatgtttgctccaagagaccagccaacagcataaacgttagattgaggaaaacgtcctaaaacatgatcaactacttgccggagatctccagtaaatgatgccgaatagaactgcacatgacaggaaaataacgttttaagaagacgagatattgtagcgtttttttgctttaaatgtgatttgattccattatattatacagtctgctaattcgtaggtttcctccacaatattcaatattaaggcttatgaacatggtgaatggtggcttgccaatatgtctgcattatagatcaggttagccaaaagatgctgataagtttgaaggacacaagacaaccattttttttcccaatataataggaagaaatgttctctagaaaaaaaaaggtcaacaatgaagtgcaaaactgaattaacctttcattgttgactacatatctgagtgccaaacactaccatggaattaggagccatatggattagcccttcaccatatggtgctgaagtaggtggctcatgtcatattcccagcaagagcataaacaaccttcagcttaattaagagtgatcagaaccaactaaagtgcaagctacatgtatcagacaggatgaaaatctgaaaaacagtcccataataaacaacctctacaagctgagagagtaaagttgatcaactgattctgacttcttttttcaattgttacttgatttttcaggatctactgaatatagtgaatacaatgagattaataaaatatttgataaagtaccttggctgtagtcactggactgcctgcacatccacggctgttaaacaccaccacgcgccatcctttgtttctagctcttaacagcatatgccttacatatgtatcatcacttccccctgttagaccaggctgccgatgtcgaactttaagcattagtcactaaccataagctagttaaatgcatgtctgaactacagataagcactggccatctaacagtaaagataaaaggtaaaatagaagtcagatcagttgatttcagttctgtggtcatatacggagtggatgtctttgactgcacattggacgattaattttagttctgtcagatgctttcaatgggtcatctgagatgtcgtgaacctgttccttggagcaggtcaacgaaatgttgctagaatctcccgtttgggggaaatattatgacggcaaaagcttagttgcttttcacttagccactctgaacactagactacttcgatcctggactagtcatcctaccagtgttatttggccatttctgaacaaaaaaaatactatcccaatcccaatgcgaatcaaatctcattcatcgattcatttctaactaccagcaaatgcattgacgctcgatgtatacaggcatacagcgcgcaaccacacacgagactacgagagggaaagcgacaggcataccaggagtatgagcaccggcgcgtcccgcggaagcgcacggtcgtcgccggagacccagtcgagcgcgacggcgccatcgtcgggcgtgcggaggcactcgcggcggagcgcgacggccgggagcgaccgcgcgaaggcggcgaagatggtctcgacgtgccggttcgacgcgacaatggggaaggctcggtacggccggcggaggctgtcgaacccggcgaggaggccgcagcgcgccccggcgacctcgaggctctcgtgcgggaggaggggactcggcggcggccgctgctccccggcgccgcctgagacggggcggccgttggagggggccgagatggaggaggaggaggtgctggacatggagacggcggcggccgggaggagggagcggaggcgaggggcgacgaagcggcgggtggaggcgaccagtggggatgatggcgtgggtggcgcggccatggggggggggggggggggcgtgggggttggtggtggtttgggacttggtggtagtttggtgcttggagtgaacagggtggggcttgggaagttgggatcctcggcttttcgagttgcggggccggacaggtaggagccagaaggatctggtggccgggattgcggccacgtggctatcgtgggaggatagccgctcaaatcttgggctgggccgtgtttgttgatttataggcctattttaggccctttcacgggatgagctgggaactagacttcgtatagaaactgaaaaaggactcagccctgttctttttctccaactaacgttaactttcttatttttcattagcatgtttttcaaacggttaaataatatatctttaaatatatatatatatattgttaagaaaaataaaaaaaccatttctaaattttataataattaatacttggttaatcatacagtaatgatttatttcgtttcatgtatcaccaaatatatgggccgaactattaggtctaactcggggtcttctagttagcgcacctgcgccggtaatgttgctagcgcgcacttttctgttccgcgtcggggctagaaggttaagcccgtgggcccggattaatctaattatagttttttattatcaaaataatacataataatatagttaagttgaaagttttgaaaatatgaagaatattttcaaaatctaagttgaaagttttaaaaaaattatcttgaaagtttaaatttcgagttggaaccttttaacctcgagttgaaatttttcaaatttgagttgaaagtttttaaattttgacttgaaagtttttaaatttcgagttgaaagtatttaaaatttgggtaaaaagttttcaaatttgggtaaaaaattttcaaattcgagttgaaagtttttaaaattcaagatgaaagttttcaaaattgacttgaaagtttaaattttgagttgaaagttttcaaattttaaattgaaagtttaaattttcaaattttgagttgttttaaattatggtcgtgacttttaatttcttctatagaaaatttcaaatttcgtgtatagaattttaaatctttagttaaaaaggaaacaacttcatggaaaaaaaggaaagattaattaaaaaaaactatcggaaactaattacgtgaatgaactaatcgtgagatttttctccaaatctagcgcggcggcgcgcgtgcacacgcctctcgtggtgtttttttttcacgaagaaaacaaaagtgggccggagcggaatcgcgtgaggatataagcttaaaacgcgcgccagatcgctagccagcgcatctgcgctaattaggaaactcggtctaactcagccttacttggttttattttacttgcgtggttcctacccacttgaatcaaatttctatgcaacatttttcaaagaagcttctaatgaagtaaaactttgtaatcagacaggaaaattctgatttgtccttatttgtacgaatcattttctatcaataagttttcctcgcatacgcttcttgaccaaaagtataaacgacaagtcaacttttacttaattaacgaattgccatagttttacaccttttctcttcctagtgtcatttgtggtctgagtataattttcatcctcgtccaactaattcagctcatccattgaacttgctagagattactaactaacaagctgcaatttgtggtagcaaatgagttatactaatagccagtaagaggaattgtcacatagctatgtctggaaaaacatgatatttcaaatatctaatgagaatataaaaaagttggattttcccaaactatatatgctggaataaattgtcccaatgatatggcaaggaccttcctcctaggccctgtttggaagattagcccaaggctaattttgagggctaatatttagtcatgaattggtaggctaaacattagcctagggtgacatgtttggatccatggactaattcaaggttaaaaggtggagagagattagaaagagaggagagagaaggagagagagagctgcctttttatggtccccacacaaaattagccacattagtacctcttggaggggctaatattttgaggggggctaattcacattagctcaaaattagcccacctgtttagatccttgagagctaatttgaggctaaaaggtgagggctaaacattagtccatggaaccaaacagggccctagttgtccaaccgaacatcatatctatatgtattatgtttcatagtttgcatggaaaattatactatttagggaactagagattctgatagtaactattaagcactgaaaattatacattcgagcgcgtcccccgccgtcctcgcgcggttgaccgggggcaaaccctagccccggccactgccaccctcccctccccctacccacctcgccgccgccagaaaccgcgcggcccgccgggatagcggcggcagtctgtctctggcatgaggaggtgacacagcacgcccgccgtgcggcggcgcggcgagtggctgcagatttggcggcgccgctgttgatgcaaaaaacacacactggtctggaagatctgcttagcttctgcgcaggtccaatatcgaatccgtcttgattccaatatcgaacctggttcatattctaccaaatttggttgttaatagccgccgccagatctagcccctccgcggctggatccggcaccgccgttgctggatctgtcctagggcacggtgagcaagtgcgggagtggcgctggtggaaggatgcgggcgaacagcgtcagcaacaggttgagggcgttgacgacggcagcaggaggcagagaggttgcggcctcgctgcggctggtcggcgcgagaggcacggtcggcagccggctcggcgcgaaaccggtggcggcgttagtcggcacggtgtgttgaggtgcagtcggcggcggcggacgccggcgaggcgcaaggaggcacggtcggcggcagcgaaggcttgcgcagcgcaaggagacacggtcggcgacgacggaggccggcgtagcatggcaacatgtggaggctggccggcggggggcaccagtgcaacgcccatgcatcggcgaaggttgatggcggtggagcatcgacacgatagttgtggttttgtaggcggcgggcggcgagtgaaaacttagcctggccttggtctgggccggcaattacggtatttttgagtctcttccctcttgagggcgttgtcgtgccatcccatctcctccagtgggtctgccgggtgaaaacctactctcagttctctttgagaacttgacagacaacggcagtggtgttttcatcgcttctctccctggagacatcgtctaggcaaccccctttgccgaaaccctcccagacaactggtgcaagaccgtgctctagatgcttgtcctcttgtgtcggcgtcctagcttatgcaagatggccacgtcggagggcttagggggagagcggttccatcttctctctcaccctctctctcccttaatccaaaagaggtggctagagtgcgctttggtgtcggttgttagagttatgttttgggcatcctcagctgtagttcctttgttagcctagcagttgtcgggtttgtgttttggtgttgtcggcgcgcggggtggtcattttttcttcattttcctagttacaaccttccagtgttataatcttgtaatttttttctctatcaatatgaaccttttttttcatgaacatgaaaaaggattgcacgttaatatattagaagaaaagagctataattacacagctcaatcagttagaccagactatcaatataaacttagcagtcttgtgcgagtcgttaactattaggagctcgcaaaacaagacctagtcgcatatgcactatgtaaagcttcagacacctttgccctattttatcgagatgttttttttccgaaaaatatgcagatgctatcatgcttatcctaatgcggattgctgacctaattaaaactcctttatggctttaccacaaccacttccgaaaatcacatcacataacttgtatctgctctttgttaaggttgaactttcactattgggcacatgtctagttatctacattaaatttgtcttataagcagtattttattatccaacctgtgagctgaacttaattagtggttgccacagaatcaataagctccgcctaatgcaaccaccagacaaagtgacaaacggaaccccacaaatctgacggctttcaattaagttggataacttgatggctacatggttatcacgcagaccatttacatgcaccaacgtaacaaaactgacagagtgataaaagaggtgcagattgtgccaacgagttcagaacaagcttccccgcaaaaataaagttgaataaaaacgagttcaaaacatgctactactacatccaaattaaatccatcggtttttgtttgcagtggaagagatatgtgcacccaaattctcgccgtcgttccatcgtttctgtggacacgagcgcctcgcagcgctgcaccatccgacgtgccaaatatctctagcgtgtgataatagtgtccccacattctgacgacacacgagcaaaactactccgactgacagcacgggacccaccgcctccaatcccgttaccgctccgtgcgacatccaatcggaactgataagccccgcgctcttccgcggtgaaacccccggagagcccactacgagcgactgacaaacgggcccccaccgagcagcagcccatgtgggcccacctcgtcagcggcacgtcgcgtacagatgcatcggtgacgggatgtccgtataacaaaccatcccgtgtgacggcgtagtggcgtaactaacggccaccctctttccctccctcctcgccggcctcgcctcggcctctgccttcctcatctctccccctctctctctctctctctctccctcctcctcctcaccccgacccctccccgccgattcctccctcctccacgcgcgcgcggcgcggcgcagcgagcgctctccgattcttccggctccgagggattagggttccgggggggcacgcgtccgctgacatggcctccgcctccgccgccgccgaaaccctcgcggcggcgtcgctccccgtcgcgtcgccttcgcggtcgctgctgcggccgctccccaggagagcgtccgcgggaggcggctgctccgcgtccgtacgaatctccgccgtgccgccgcgggggctcgggttcgcggtcgtccagcgccgcgtcctccgccgcccgccggcggcgcgcgccaacgtcgagcgcgaaggggacggggccgaagcgtccgggccaggagaggcgtcgtcctcctcctctggagatggggaccgcgacggggcggcggcggcggcggaggcaggaggtgatggcgccagcacgagcaccacgagcgcggccgcgacgcctccgcagccgccctcatcgaagaggggggagaacaagtggcggcggaagctgattaagggcggaggcgttgggcggtggctttgggagcccatagttcaggggagggaaatggggttcctcctgctccagcttgggttcgccatattcgcgctccgaatgctgcggcccgagatcgcgctgcctggctcagagccccggccacagacaacgtacgtcagcgtcccatacagcgacttcctggcgagcatagacaagaaccaggtgaagaaggtcgaggtggacggggtgcacatcatgttcaggctccgtcctgaggttgaggcccgtgcaatggagcagccacaggtgcagcgtggaacagattctgttgctgataatgctggagttccaaggcgaattgtcttcacaacaacacgtccagtggacattaagacaccatatgaaaaaatggtggagaatagtgttgagtttgggtcgccggacaaaaggtctggtggcttgctcaattcggctttggtaaggcactacagctgaaaaataaatttgttatacgtgtggtatttttaggctggatatcttagtatagggaaagcaataatcacatcagaacatagatagggaagaatgcagtatagcatgtagaatgatggttattgtaggactggtgtggtgttgagttttgaaatggagagatcaattagttgcagtgacttatgcaaactagttattttgtggcttatagcactatatacagcatacttaccactggccagccatgaaggagaagaaaatgctgtgtgtttaactgtttactattagcatgaaggctcgagatatttgcaactgcgtgagagcatataattcatgttagtttcaacttatggaaaatcagaagcatcattgctcaatttgctaacagaagactcagaaatcacatattccatggtgtttggtgatagttgaaatgatgttttatagacatggtagttcagagttaaaagtttactatatttgtgccctggtcacagataagccgattattacaagaacataaattatagtcagttgcatatcacaaaaaatcctcgcatcaatatgccaaataaatcttcggatatgacctgaaataatggaattatctgaggattcatgtgggtatttctacatgcagttgtaatattacgcagtagattgagtttctaacctgacttcaaatgcaaattgaaagcacaacttttaacattaagactttaaaatcactagtacttttcttcgttattatcatattcccctcgtcccttcatccttgtgaactcttcattcatcaccactgttgtataccttgaatgagaaaacaggatggaatgatttatggattggttcacacgaaaaactgaacttccagttgaatgttggaacttacagatcaatgaattaatggggttttgttaaaacttagtatggcaaaatggaatcctaagtagaaaataggttacagagcataccatttatctgagacagcactgttttgctgtttcattttgttcctaacttcttctttattagaaatatacagctctctctcctagctgcgtttttttgtcctaaccatgcccttattttttttgcaggtggctcttatttatgttgtattaattgctgtagttctgcagcgattgccaataagcttttctcaggtactgatgaatgcacttcattacttcaatcaactaatgaacatactcggttatatctttaatagatataatatagtttcttgtgtatatcagcattcagcaggccagctgaggaatcggaagaattcaaactctggtggggccaaagtttcagaaagtaccgatatagttacatttgctgatgtggctggagtagatgaggccaaagaagagctggaagagattgtggtatgtgttttatgctcaatgttactggtatatgcagttatccactgatattatgccttatctgttgactcgaggggaataagctagttatatcttaatcttatgttcaggagttcctaaggaacccagaaagatatattcgtcttggtgcgcgacctccacgaggtgtcttgttggtcagttctgcagtcatttaagtaatgatgaatgttgctggactagagtttttgtactatgatgtaattcattatttacaggtgggccttccaggaactggaaagacgcttcttgcaaaagctgtcgcaggggaagctgaagtcccattcataagttgctctgcaagtgaatttgtggagttgtatgtaggcatgggagcagctcgagtgcgtgacctatttgctagagctaaaaaggaatctccttcgattatttttattgatgaggtaacctactgtttgaggacaaaaatctagttttatgtgcttaaatgtgtgataactaattgcatttctttgtagattgatgctgtggcaaaaagccgtgatggccgttatcgtatcgtcagtaatgatgagcgagagcagacactaaatcaattactcacggtattgatagtaaagagtcctttaatcttgtgattctgactatattttactcacatacacacatctttagttggggtccaattgaattatcttcgtgttaattttctctgaatctacctaggaaatggatggatttgacaccaactcagctgtcattgtacttggagcaacaaaccgagcagatgttttagatcctgccctccgacgccctgggagatttgaccgtgtagttatggtaaattgatcttctcaataaaaaaaagtgatactggatctctgttgtctgaggtcatagatatttatgtgataggttgaagctcccgacagatttggaagagaatctattctgaaagttcatgtgagcagaaaggagcttccgcttggtaaagatgtagatcttagtgacattgctgcaatgacaactggttttactgggtgagaattcttctgctcctttttaataagcatgcagcattttcagttgatttgacattctttttacactatacagggcagaccttgcaaatttagtaaatgaagctgctttgttggctgggagatcaaataaagaaatagtggaaaaaattgacttcatctgtgcagtggagcgctctattgctgtatgttcctttatctcaaattcgtttgctattattgtttgctaaggtcattttatacaaggaaatttcgtctgcttggtttcttatttctatcctagttttcttaaccgatttacaagaatatgtggaatggcaacttatacaagacaaatatctagatatccattttgaaactattcttgacttgtctctcccaattctgcttttgtagtataggtaataaagctgccagtgcattatgtccactaaatgcgttcggtttcttgcaatgaatttatgtctatttccacccttgctggtagtcaaattttttaaagtttttgaaataccgttcaacttgtgagttttttgatagattttggggccgtttggtagggctccaactcctaaatttaattccaagagttgggtctgaagtggatttgtggagctgcctaaacccagcttcacctctctagttcattttgtgagagcactccagccagctccactccattcattggtggagctgaaactgtttggttgggctccagctctaggagcggtggagtttgagctagagatatgccaaacaggccctttatggattttctttatttgataatggggacgccataaggtcatatatgatgttactgtcctcattcttttcctacatgctgtccattgattcagcactgaaggaatggcccttttgttgatccttgccctagttcaatattgttatggaagatgtatctgttccagctgttagagtagacattgttttacttccacattgtttcctggaaactaactggaattattttcttagggcattgagaaaaagcatgcaaagctgaagggtaatgaaaaggctgttgttgcacggcatgaagttggtcatgccgttgtgggaactgctgtagcaaacctattgccagggcagccacgtgtggaggtttgaacgcaagcaactatcgatagaacagtttaagaaaatgttcgtcttgggcttacattttagtgttgttcttttttccaccagaaattgagtatattgccaaggtcaggtggtgcattgggctttacatacacccctcccacaacagaagatagatatttgctctttgttgatgaactgcgtggacgtctagtaacacttttgggtggaagggcagcagaggaagtagtactgtcagggcgtgtttctactggagcacttgatgacataaggcgtgccactgacatggcatacaaggctgtagcagagtatggtcttaatcagcgcataggtccgatatcggtggcaacattgtcaaatggtgggctagatgaatccggaggctctccatggggaagggatcaggtctgtctcaaaatgtccctactcctttacttgaattttttatttggaatttggacattttcgcgggtacttttttttttaactttttagaaagtcaagttcttttttagaaagattacccgtctttgtccttgcctacgaatcagtccacattttgaacaaattttacgaacagaagctctttttttcatgtttccgtattcctttattaaactatgaatttactcttttggaaaaaaaaaagtctctttgcctgacaaatgcgtaagctaccatctgcatgtattgtgctcacactgcaaaactaatgacagggccatctagttgaccttgtccagcgggaagtaaaagcccttcttcaatcagcccttgatgtcgctctttcagttgtccgtgctaatcctacagttttggaaggccttggagcatatttagaaggtaaaaaactagaccaaattatcaggttgcatatgttattgtggctctcctttctatgatgggttttgcttcattagattaaaaatgaaaactgtttaacctatgcataacggctttcttctctaccccattcagagaatgaaaaggttgagggcgaggagcttcaagagtggctcaagtcggttgttgcaccaaaagaattgacctcatttataagaggaaagcaagagcaggttcttcagctggaagcaggctcctagcactatacattggtctcgtagaatcaattaattaatttaacacaagtagctccaacagtttaaactgtacaagttctgaggtacgcaactcacgcccaagccaagacccttgtgatgctgtatatatctatgtgccgctccacgacccttgactacaggtctaccaggaatgattcatagcgagttgtaaaccccggagtattgtaagttccttcggtttcctcgtttgccgttggatgttgtttatagattaggcgggtggtacacatgtaaaagaatattcgtttttcttctgtgttctttctctttctgttcatcctgcggaaggaattttttgttacattgtcatcttggcaaatattaataggaataattcatatacgtcgttgatccttgtatttggattatttactcagtctgttcccccatgcttggcttgctcaattgcctggttaaacgatgttttcctggacaagcttttcaacatttaaagaaggcatacatagcattgagatatatctcatttgtattgagaaaagagtatgaaagcattatggcagatgactgcctcaacggctcaacctgctttaatcttccctccctctgtcccgtgtagccataatttttcgcacctaacttttatcgtccatcgtatttaatttttttaaaaaatttaaaaacataagtcagtaaagtactattcatattttattatttcataacaacaaaaaaatactaattataaaaaaattcaagaaaactaatattgggtgaaaaatttatggttgcattttatttcataacaacaaaaaaataataattataaaaaaaattcaagaaaactaatattgggtgaaaaatttatggttgtatttaaaattggacggagagagtagtccatagattttaagtcattatactagtactataaacggaagatgagtagtccgcagattttaagtcattatagtactataaacggaagattctagatgatccaaagaatgtgaagtgtgaacgatggagatgaatcaatggttcatgctcagatgctgaatggcagaaaagcagacaacaacaaaaaatagaaaacagaacttcatcggcaaacatttatttttctttacggagattactaataattaactagcacttagcactggtacacttaattgacagtctgacacttcgacctatggacccaaatattcagatgacgattccaagaggcccccagcctgcggcggcagagccgccctagccctacgccgtcttggtcttggcgaagtcctggagcgcgtaggccagccccagcagcacaaccggcacggcgagctgcagcgccgtgagccaggcgccctggctcgcggcgtccggcttggcgctcgcgtcctcggagacgacgcggtaggccggcttggccgggaccgtggaggcgtcgacctcgccgatgcagtactgcggcatcagctccttcgccgtcgccgtgtgcccgatgtcgttgaaatccgcggtcgcgtccttgcctgcagagtgagacagttcaatccattccctggatcagcttgtgtgatcatgtcgatcaaagtctcagagcatatgtggtgttggggggaaggaatcagatcgagcggcggctcaccggtgcacgccagcaggacctcgtcgccgccggggtgctcctccatgaacggcgacacgtcgtacacctggagaagaaatgaaaaccaaacctcaaaaagaaagaaagaaagaataaaagaaagaagaaatgaaaaaaaccatcataattatcatgctgaattcagttcagagaaaaacgatagggaggaggagagagtctggaagtggcgagagctaaccttgccggcgatgatgagccagcaatccttccggtcgttgtgcttgctcacctcctggaacgagtacaccgccttccctccggccatcgcagccaacccttccggtcttctgttcttcctcccggaacaaaccacaaactgattcgcttatacactggagatcgacgagttctgcaacttatacggcgacacgaacgtttctgtttcttggaccagacagacaggcgacggcacctttctggctggactatctatctttctatctatccagtactactactatctatctatgaatctatcccaccgttttgctcatcccgtgtgccgggcggcatcttccgcggctgactatatagatagagagagtctcgtcacgtgttggcggcatgcggttttggtgttgacctcgcgtgcctcggcaggtgtcaatttctaatggtaagacccacatgctaagacgtttggtaattggaggacgtactctccaaagtagctctcacacaccagacgtttggtaaaatcagcgaaaattcgttggaagtttgcatctttttgacttgtaaattaaaattcctcttgggaaggcgggggcaaaggtatgtactgcaacagctccagaaccatatataactacaaaattgctctctgatgctgaacggcacatgttcatattgattctttttttttttaagggaaatgttcatattgattgatacaacatacaagtatacaacatcttccttgcgagcagagatcaccaaccttggcttcgaaagtaaagaggtgatgacatacgagcttcgacctgcctagtagtcgagaaatgctcagggatcttctgactagctctataagatggtgggctatatgatctgggttcgaagctttactctttctaaatatttgatatttccaattaaaaaaatttagttaaaaaatatttaatattagatccttctctaatattcgtgtttttttccacctagtagtctccatctgatccaaggtgttttcacgggcaacacaacagttgtagtagtagcagttagcaaaggcatcgagtgaggcatcgtatctccatcattcagatttgtctgaccgggccggtaaaggcttccatggtcttccatttcggaaattaattaacagcgtctgggtacactgatatcagcgaaatggcttaggcaaaaggccaaagattgctcaggaaatggcacatgaatttcgcccccctcatttctattttactgcggttcgaaggtgcaaaccagcggcgacatacctgtgggcggaggcggactggcagagtggaggacttgacccgagtagcctcaggcgtcactgcgtcagcgcgcgcttggcacggcaagcggcccggcgctgcggaagcgaagcggctgccgcgagaggagcatatgctgctgcggctaaggttcacccactcctagaatcctaagatttgccaagcgtccaagcaaaaaatcctatagaccgttaggaagatttaggtggccgaccgtttaaaattttagtaagggttgttacgagaacattcggctatttagcatgtggccgacgggatatatcagtgagtgagagttataagataccactcggaaatggttataagtggccgacggggtatattagtaaccgaggggtttaatataactctcggaaattattattagtgaccgacggggtatattagtaaccgatgggtttaatatgcctctcggaaatggttataagttccgaaggtacaagaaaaaattaccgagaggacataactttaccgatggttcacaatggtacctttggcaatgatatgtgacaaagagaactatatttgcatgaaaaaaatgtaatataatatgtactgtaggctataactgaaaaaaaacaaacgtccttatatatagtaacttggtttttttaatctttagtttagatcaaattgaagtatatacacgtgggcacaataaattaatggactctctagtctttaccatattaaccacatagttgttatcttcaatttgattggtttcatatgtaagatatcttgtgcttagcatcaaagatagtatatacgcttatccattttattctcatatatcctcttcgtacgagttattctcatagccaattttctccttttccatttcattaacggtaccgttcaccaaaccgtcccaagtgtggttactgtaaaaatcgtacgattatcgtgagatatacagtgattttagaaactgaaaaaattactctacgtgataatcatgataaccgcatggtaatcatatgattatgtaaaccctgctaatcatgataaccatatggtaattactctatgtgataatcatgataactgcatggtaatcatacgattacgtaaaccctgcctgcaacgagctgcgttctttggcgggccgggagccgtgcgggcgtcgccaccgttcaagggggtggctaatgggcgatcgatcgcttggagcgattgattcccatcccccctatacgctctctccccctttctcctcccattcttctcttcctactacaccataaatttaaaataaaaaaaaaataaagttgaaaaaagttatgtatagaaatactatatataaaaatatttgaatttaaattcaaatttgaaacgggtatataaacttttgacttataaactttggatctataaactaatatttgaattcaaattcaaatttgaatcagatatgcaaacttttgacttataaactttgggtatataaactttaggtgtataaactttagatgtatagaaatactatatataaataatatttaaattcaaattcaaatttaaattagatataattcaaatttaaatcgggtatataaatttttgacttataaactttgggtttataaactttaggtgtactccgtataaactttagatgtatagaaatactatatataaaatgtatttgaattcaaattcaaatttgaatcggatatataaacttttgacttataaactttgggtctataaactttagatgtgtaaacttgatacgtataaactttatgtgcataaatttactaaaataggaaagtaacgcggtgaaaaaaaaaagaaaccactggaggagagggggtatcggctgatccgatcgatcgccccatagccttttcgccgttcaagctctcgtggcgcacgctgggtcggttgttataagtcgtgctgggcctaggacttgtgtgggagtgggacatggatgtcaacccaacatttgctttgtggaggaccgacctgcaatacaccaacgtgagcgaagacgtacgggtcatgacgccgatgcgcaccggcagtccggcacgtacgggagctccatctgcggaccaacgagtgcttctgcctctttatgaaaactttcaatctattatctatgaactacgtattaaaagttaattaaacttcatacaaacgtttctaaacaatcacgtgtcactcctaccaacgcttctaagccgtcaactgacgctctaataaattagagaaaacattacaaatttccgatgaaaaaaatattttaatttacttaaaatacatcctatataacctccccgaataagaaaatcatgtgaatagttgtacgtacatatacgtacttccgtactttactactcatggaaaaaaataaacaaaaaaacgtaagtacggttgagaaaaagaaagaaggattagccctgccgctcccaccaaattgctatgagagaaactgcatacatactgttcacccagaaaaactgaaaaaaaactcacatgtacaatacgtactactattcatggattgagaaaaaaaatcttcgaatatgtacatactatgcaccgtcctaccatccttgaatctttatacatacaagcaacatccatccatcccctaataggcccctttgaatcaaaggatttatgtaggaatttcataggattcaaatactataggaaattttcctatttggccctttgattcaaaggattaaagcttttcaaatcctatgaaattcctatggaatggcacattgcatgtggattttagagaaaatatagcaagagcttcaacctcttggaaaatttcctttgagtctatctctctcatccgattcctgcgtttttcctgcgctccaatcaaacgacaattcctgtgtttttcctatgttttgcaatcctctgttttacactttaattcctatcagaatcctgtgtttttcctattcctctattttttcaaccctgcgattcaaatgagccctaaacttatctaaattagatgtatgtatggaaaatattacgactagatttgatattaactatattttttaaaggagatattaactatattttagtttaataattatcacatgtaagcatatttaactttgtccagtaaacatcctataaacgctgtcaaaccatcacgtagcacttctacaaacgcttatatgcctgcattttaataaattagaaaaatcacaaaaaaatatgagaatgaacaaaacattttgatgtagttttttactaatatgcagtgaacccattgtgcgtacatacctccccacctatttcctttctctcctattttcctcttttagttagatggaaaaaatattttatggtaacaaattttaaacaactacatcatctaaatcatatagctaacctcttattggtgcacaccactagattatttactatagaacttaaaattgaaaatacaagtgaactatattattaaaaaaatcattactttggctattgttcactgatccatacatctttaagaaaaaaaatcaaatagatttttaaccttcggattaataacatacacttaaattagaataatttaaaacaatttaagtagtttaattaaaaaatacaatacccaaaatattttctaataaatctaagattaactgtatttataaaaatagataactcgaaactaggacccattcgatctatctttaaaacattaatatcctcccatcctcatgccgtatgtatatctctgaccctcccgtcctcttctatccaattcaattaacctcttccatttttttaactaacataatataaaaacagtcatagatattgttttatttataattaaataaataaatcaagatcgcattagctatattttactatataaaagttaaaattacatcatttgaaggtagactctatcattcgcatggcaactaaataacaacaacaaaaattaattgaacatatgtattatattatactaaatcattctacataacaaaaatcaattaaacaccctccagaacgcttataaataattgtatatcatattctaaaattctaagaaaaaccaaataaattgacgtgtccataatttttaactattagatcaattatttttttttaaaaaaatcttgaattgccatgtgtcacgtcctattaaaaaacagaaagaaccttcaaaattcttagaaaaaacgaaacaccacatcatcggctttcacttaaatcatttagaaaaaaatagaaaaataaaatctcctcctcctcaccctcacatgtacacaacactatccgccccctcatatttgtatctattaaaattaaagagaaaaaaatcaataaagttggatattgttttgagaaacaaagtacaaacgcatacgctcacaacgcgcacatactcacccctataaacgtgcgcacacaccctatccctatgagtacctccaacagactaggctgacatattttgagattaacgaagtcaccacgagtgccacgctgtcgacagatatgtcgcttaccactgaaagaatttgttaagtctaggacttgaacccgagtgggcaagttctaccataagaaacctaaccagttgagttagtttacttcacaataatgttggatattaaaataaccatagtttttaaactatatttctagaatactcatatgcgttttaaactggtggaaccattatttctaaccgttagatctatcatatattagaaaaaacatgtgtgtattcatcgtacattacatttcaaaaatattattgtgcaattatatttcgtccttatcgtattcacgttagattgtgtggtacctccgacccactttactgaaatgttcatagatggaccgcctctcaaactatatcaatcatattaggctttataaacccatacatttagtggagcttcatgtcccacccaatttgtcctctaataaacttacgttagaaaattataaaagcaattaatgccgccaaaataatttacggagaaatcatagctgatgttctccggttaatgtttcgttcttataagtgtctcaaacttaatttgtgtatgacgcatgcccacacgaatgtgcgggctaccttcgtagttgtagaaatagaaaaacaaagaaaaaaaacacaagattctaacctaaatacaagatacatgtgtaaaacagattattgcaacaaatataaataatcgtttaattggaccatagaaaaaacataggaatcggataagagatatatagtcaaaggaaatttttgaagaggttgaagcgttgtaacgttaccacacaggtggaaagttgtttcttttgatgttctgattgtaagctgatgtcctcatcatcaactttttctgtttttatttacttctgtaagaaccatatcagctttcaaaacaagctgaggtctccctcgcccctttatccaaaaaataaaataagatccattattattttccatagagttccctaggcaaagctgagagctcttcacctgcctgggatgcggcaggagaggaacacagaaatttcgccagaagttccactcagaacccggaaaggttctgaatgagtacactctccaaaaattgcaatatgtgatgaggcgctgctacttgcaaggtcatagcactattaattactgtaattctttggtgtagcaactatctaaaaaaacaaactaaaataactaaatacaggaggttgggcaatagtactctattcatatttatccttcaaaatgatgcagaactacaagttctctattatgtacttaacacaatacacaaccggtaacagtagtctgaagaagttaagatccacttccctctggaaatactgagaaaaactgattttcaaggcaccaacagataacctccaaaatggtgcctatttaatactccatccgtttcaaaatgtttgacaccgttgactttttaagtacgtgtttgaccattcgtcttattaaaaaaatttaagtaattatttattcttttcatatcatttgattcattgttaaatatattttcatgtacacatagttttacatatttcacaaatttgtttgaataagacgaacggtcaaacatgtgctaaaaagtcaacgatgtcaaacattttgaaacggagggagtacttgacaaacttgttgcatttttatctttccaaaacagcgtggaactattgtaataagtgatggtttgctttgtgcatcctagatacagaggccggtctatccattacctaaaagaacagataacctccaataagcacaattcattaaaaggaataatacggtaacagaacactagtatccaaaatgattatatattagtcatctcacctatcataccatgtcgaactcagcatccaggaaacacctgtttctctagcttccgggagtgaacttcatgcagattggtggcttaaccttagcaagggaaagcagggaagaagggaacatccatataccatctccacaaataaaaccagacgcaaccgctggcactagcaacgcagactccttgctgttgatcttgtgccaggcaaagactatcaggcttcccacacacatgtcaatagcaaaatttgcaccaacaaggaatggcacagccattgccgtcggcaggggcacataatccctgtacttgcgtggcaagaagtccctcataaggttgatgagcacagaaaatgcaaagaagccagcagacagctcaagacaatgctttggtagtgcagaaaagccctcgacgccaagaatggccatgtttcgaaatatcagggcatatggagccttccagtatccatcagggttcccaatatcaaatgctttgtagaagagcaagaaagtcagtggagcgattatgcagcccatggctgtaccaatggcctgcccaacaagcatggatcttggtgatgttaatgtcagatgaccagtcttaaagtcgtgcatcaaatcagcagagacttgtactagctgcttcactattccacaaccaacaagaccagcaatgacaccgttgtccctccctccccaagctgcaaagatgaagagagcaatcttgccatagttgtagctcatgttcatgtcagttagcccagttccataggcattggagaatcccagcacaggagcaagcacaaaggctacaacaacatagtaccacttcacctgttggaacattatgggtatcgcaattaccgcaacaatgctcagtaaggcatatccagcatacgctagccagtttggaatatagtctttgttgaagaactcgtcacgctgcatatcagcaattacaaatgtatcctcatctgtcgctgcaattcactcagcttcagctaccttggtgatataagagggaagaaaacgtggaaatagttaatttcgcagagcacgtttacctttcttagcatgtctacgattggatcgttcatgcaggctcttagcagtgatacctgttacttttatgaagtggtaaaggccatcccccatgatcaaagctacacacatgaaggactgagaaggagaaaattagagatactgtaccatataaaattatggattcacatcagactattttgagaaaaaggtaaattgtatgcctgaccttgtaaccaaacaagcttgtcatgctgctttcaggaacatttccaggataccacttacccttttgtatgctgatcagtggccacattatcccccaagaaagtattgcgccaaagagcgcggagaggtttacaaggtgtgagcagatcattcccgcaccaacatatgtgaggctgaaatcaaaatagaacctgcagcaaaaaaaattggtagttaggagaatctggctgcctgacgaatatgcaattatgcataaagtaggggtacaaacaatgggtgaccaataatgcatacgtttgtttccaagcctttagaccaaaggtagggaattgaagaaacccacaactctctccaccagtgtagaaccactggaagaagctccataagaggctgatcccaaagcaattcagaaatccgcggacttgcttcctggcatgaaaagtagaattaataattcatatcacgaactgcgatgatgtatttagcacaagtgagacctggaccatactttgcactattttctccttgaggggtatggaatccgtttataagaacagcagttgcagtcccacttggataggttaacttataatctatgatcaaagcctgaaaacgtcatgcacatcattaggtgggacagacaaatgcaaagaaaactggtttctgtcttcaaactacagattgtaatgacaaattttttagacttgaagaagagtatctagagggaattcgtgtgtacagttgtctcatttagtctatgacattttatttgtctcaaaaaagttcatttcgttttagcactttagtcaacttgttggttaaggataatggaaatgtaatgccgcataccaaatattaggatgtgtactatgtagaactcccaattggtgttgaactgttgcaggttagttgggtttccatgccatgcacacgatgtgcattactctggagtctgaacaagtagttctagttaaagccttaaaggttagcaagataaagcagatcaagaacctaacaaagtaaaacagatagtggtagactgatgggtaacttaaacttcctagtctttcttgaaaacatgacctatccgtatactgggatcagacaaatttacaaatgtaacaacagattgtttatgtaaaatatcatcttaaaataggagtgagttcacaatttttaatatcagcacaaaactgagaatatagcacagatttcacatgcaacaactgagctatattctccaaaaatccgaaacaaaactgagagaaaaaaacagttcactgaaagatagcaaatcacaacaattaacgaacataatagcaggaactccagagagtcctgaatttgcagggacaggtctaatttaatccattgcatattcagtaccaacggaacaaaaattgtgggcaaagtacacacctttctgagtggaagcaagttaaggagcccaacgaagctaatcgcaaacaggaatccggtcatccacccgaccccgggctccttgtagctccccggcgagttgcccggcgtgctcaccccggccaactcgtacgtcttcctgttcagagccagcagcgacgacccgaacccacctgcgcgcacgatatcccccaattttatatacaggcgccatcgcaagaacaaattaagaaagacttggggagagaaatcaaacaggaagtagtagcggggcgcgcaccgccgaatcccatggtgtagcaggcgacggcgcaggtctggacaacggtgttctcctggcgggtgaaggggcggcgccgggaggaggaggaggcggcgccgccgccggggaggaggagggcgggcgcgcgcgtccagccgcggagcgcgaggaaggcgaggagcgcggcggagacgttgagcgtggggatgatccccgtggtgagcgccagcttcatgatgatgacggtgtagacgaatccgatgagcagcgccgccaccatgccccgcgccgtcacctgctcgcgccacggcggcacgcgctcggcggcggcggcggcgccgtcgtggtccgactccacgtcgccggcgtcgcacctctctatctcgggagcggcggcttccatgtgaaaggtggcggcaccagcttagccgcagcttctctcgtcgtctccctgaaacgagagggaggaagttggtagcgtgatatatttaggcatgtcatctcttgtataagaagtcttatctgtgctaattcacacggttctctaatctctctccattctgtttttgtaaattggttcagtagatagcgtagggttatgcttatatatactccgtgaagtatatatttaaaaattagtcacacgtaaagtactatacatgttttatcgtctaataacaataaaaacactaatcataaaatttttttaaataatacgaatggttaaacgttgaatatgaaccgtgcaaaactatatttattttgtaacagagaaaatatttcacattaattagattgttgttttatggaaggttggagagctgcgccgccgttgcgcagacctaggaggctgcttataagttataatcaatcaattcacggatgccggctgggacgcggcccatcgtccgggaagacgacaactcaacgcaaaaagccgatatgcctccaaattgccattgccacctctacggctgtttatactgctccaaatcaaaagcgtccatggaagaatctagtatttcccgcaaagacgatgatgatatgcaggattggatatatagggggttgttgcatgattgctagaactcccgtttccgaagttgttcgtccatttttaaagctgccaaataggaatttattttgttttcaagtgtaatagagttctgtccagatgagtgaattataatttggttcacattttatttgctaagtttcagtttgaacattctcaaataacttttttcttcactttttaaccgagtaacttagttattttttccgtttggaccacccaacaatttgttgctaagtgcatctcacccgtcaaataattcctttgaatccaaattcaattatatcccaaaaataaaaaacttctgaattccacatcaattcaaaccccaaccattttaatttctctccatattttccatttctctatttttacctttctcttttttccatctatttatttttttccttttctatttctttctttctccttcctttctctgtttccttcttcttctcctcggctaggcccgagccagcccgtgccgcctcgcgccaaccctgtgccgccttacgccgcgcttgcgtgcgctcgcgcccacctcgtgcccaacccgcgcacgccacacgcacacacgaggacgatcgacggacgaatgcaatcatatccccttccttactcagctagaaggctcaagaaccgcaactttgatctcttccaccctctcaaatccgccccaacccctgctgactcaatcgccattaccggaggaaaaatccccgaaaccctattaccggcgccactaacagagctccaaaattcgtcgcataattcgaaaatattctgaaattgaaggtaaaaatggaatctacatgcgaagtactccctttcccctccaatccgtcactggaacgccgccggcgccgcctcccgctgccactgccctgtttggccgccgacagccgcacggcgcgccgctgctccaggccgccctagcttcaaccaccgccacctttggctccgcctccctcctcttatgctcaccaagcccgcctccctcgccggagatcgccggaaccaccgccgccatggccgccaccgcctcctgcttctggccgccgccgccagcctcgccaccggcgcctatgccaccgccgaccacggaaacggagtccctacaccttggggaccacaaaaccggcggcatccctcccaaaaccggcctcctccaccgccggcgttcgtgggattccggccagttctgtgcagagcgagagaagaagaggaaaaatagattttcctattgaaagataaatcagaaaattcctttttcttttcctatcaagttgaccatccgtttgacctcaaaatcaaaatctgagacctacttcaaactcctagatttattccgaacccatccgtgccagtttcattgcaatctgagcacccgttgacgcaaccctaattttggcataggtttgtcgttcgccgaaattccaaaaatctttaaaattatttatttaaatccttttcacccattgttgcactttgtaatactatttgtttgggttatctttattttttgttatttattgtggtgatgattgttgcgtaaatagaaaacgccgacgttggtcctgtagtcggagcgagtgaaatctccgtgccaggaggagacggtttgtatgactacatcgagcccgaaggttgcaagacatgcacctcctttgaacaatttaatcccagtatttagagagttattttggtaacgtacttatcctttgaaatatgatagcccgcatgagttcttttaaattaattatattattgttaacgatcaaatttggtaaatcatagattggattgggagtcaaagccaaagtggatttggaaggacttcgttcaattactagtattgcattatattttatgttgttgttatggacaccttaatgagccttagagtctaacaagcttaggataaaatttgggaaacacctaaatgaatagtaaggagagttaggtagtccataccgaagaaatggtaaagttacccggtctaatgtaaaaagactggtttaagggtgatccaaagtgaaactttagcaatagaagactactcacactgtaatttattctaatactctctccgttcaaaaataagtgcactcatctaattcaaatttaaactagaggagtacacttattttaggagagagggagcatggatcagttttatattctagaagcaaatgctagcagtatttcttactgtaggtttatgataggtgtgccaatgtgtaacgctccgcttttcgtgagacgttaaaaactagtttgagaaaatcctaattgcgaaaattttcgttctttgagtgagagttaagtcgtgccgtagatctcaattcaatctccatcgttgttccccctcatcgcgatcaaaaatcctccacctcaagattccaattccgattcaattattccaaaggtcaatcgcctcctttgaatcctcgccaaatacttgtcctgattccaaaatatccgagtccaccttgaatccattccttggctcctccgtatttcgctgagttcaaatatgcaatttgaattcaaacctaaactccaattctctccaattcaatatctctgcagaagtctgttttgcgtccttctaattttggataggccggatcccctcccgtcggcccatctcctctctcagccgttccccctcctcccctcgtatgtgcgtcgcgcgtgcgccacgctcgagagagagagcgctcgctctcttctcttcctctctctctcacccgattctctctctctctccctctccctctctctctctcgctctctctatttctctctctcgtcgagctctccccccagcgccggtttcccgccgtcgccgtttgaatccggccgcgccctcgcatccccgcgcgcgctcacgcatggctgaccgccctcggtcgccgtccgtcctagcccgcctgcgccgcgcagccgcccgcgcctcctctgccgccgcagcgcgcgtgcgtccaagacgcggaggcagcgcctctctctcccacgcgctctctcctccctcaactcacccaaaaacagcaaggagcaaagctccttcccccttttcctttttgctttttcccttccagccaccatcgcctcctctgtcgcgcccgtgaccacgctcgaccgccatatcccgctccttgaccgcctaggtcggtttcctcccaaaccgacttcaccacccctataaagcccaaagccgagctccccttcccatctcaatcccgcccgcttcagactcctactccaccgcgccattgtcgccctccctctgctctcgccgtcgctgtccgccgccgagcaccggggagaccggtgcgtgcgaggacgcgtgacgcgagactccgggcgcccgtcttcctccccttccccggcccgagaccggatggctcgccccgtgccatcggccgtgcatgcctgcgcccgtcccggtttggtagtgccctcttccgttccccttcctcgctctccctcgcctcctttagcttgcgcagaagctcggtagccgtcccgaacgcacatagaccaatgcccgccgccgcccggcacgacctcgccgccattgccgcccgctcccggaggtcgccgctcgtcgctggccctcctcagtgaaggaaatcacgagaactggagtaacgtcgcccttcacgctagggtcaacggtgcgtgtttcacttagtgcacaaatcggcacaggtaagtacatatatatgcatagacttgtgaggctcggctggggttgtttacataacaaacttgatcttatctaactatctaaaccaccggccaagcctcatcttgtctatgtttgttacatgggatagtatctctaacactccccctcaatctaaacttctaatgttgagattgtttctgaacatgaaagacatgattagctgacaaatgtttagctcccatgttatcacaccatacctttgcagctctaggagtttcaatgcccaattcttgaagcaaagtctatatccacatcaattctgcagttacattagcaagtgctttgtattccgcttcagtgcttgatctagacactgttgcctgttttcttgcactccatgacacaaggttggagccaagataaatagcaaagcctccagtagatctcctgtcatcaagggatccagcccaatctgcatctgtaaaagcactaacaagaccagactttgatttttcaaacttaagtcctagactggctgtatacttcaaatatcttaaaatcctcttcactgttgcccaatgaactgtagtaggagcatgtaaaaactgacacaccttattcactgagaaggagatatcaggtctagtcaaagttaagtattgcagagcccctactatgcttctatactgtgtggcatcactagacccaagtaaatctccctcatgtagagagagtttctctgatgttgataaaggtgtgttaaaaggtttgcaatcactcatattggttttcttaagcaagtcagcagtgtactttccttgagatagtagcaacccatcatttaccttgttcacttctattccaaggaaatagtgcaaatcacccaaatcctttagtgcaaaatcctccttaagatcctgcaacaaagctgatactgcactctgtgttgaactagcaacaattatatcatctacataaatcaacataaatattatgacatcacccttgctataataaaacagagaagtatctgccttagaagctttgaagcctagctgttgtagtttcccactcagtcttgcataccaggctcttggtgcttgtttcaagccatataaagctttatctaatttgcaaataaaattgggttgagatgaattttcaaggaaaggctgttgttttcgtaattgattttatttgaactttttttctaaaaacatctaggtgagtgcttctcaaacgacacggttgagacagtgcgtcccgtccggtcggagtatgtgcaatgtatcagtttttagaatttaaacaaggttggcacccggccaacagctttttcaacggccacccgggccaacaactcttcaaacggccacccgggccaacaacttttcaaacggccacccgggcctagctgatcccatcagctgcagatttttcaaacaccgaacccctcttcacacagcaatttcacaagcagtagtcaaaccaaactacgctaggaatcacctcacatccgcccatgatcgtgggcacggctgttcgaacagtttgttaacctctgcagagggggtacactttacccacacgacattactaacccggatcacccagcccgtggggatcagccacgtcgggagacctccaagctttcatgacaaggcatttccaaagccgacacaggcttaccatatgccgacgagaggggtcccagaccaacaacaggttaggtcccagaccatactgtgccaggaagcccaggggggtcctctccgacaccaccccggcgaatccacatgtctctcgacatcatggctcccctgataagctagttactcagccaggggtgtcccattccacccatgtggtcgtacttgtcttatgttcggatgaaattccaaggaatcggtccttaagtgcgggagcgggaaaaccgtacacccgtacgttcccggtccgcggttttagaaattcatttagttcgcaagcaccgacccaggtgtcgggttttccaagtctttttgtaaaactccaattttacccaagttgttactcagattttaagtttgaaggcgaccgtcgatacttgcacagggtgcacgagtatcgaggcgcaactgggtggttacaaggggacatggtatagcaattaacaaaggaaggatcaaatgcgacaaattaggtaggtccgccaatctgccttgcagacgggacaaacagattaagtgcgatcctatcaatgcataggctgtttggagcggagcggcgacactggcgacaggcgcgtgcagaggctgccggcggcggcgaccgggaggtcggccaccacggcacgcgcgcgcgggaagcaacgggcggcgtccgcgcgggggcgcacacgctggctcgcgaggacgagcggctgcgcggctgcaggcgcggcagagcgaggggaatgggagggggcgctcggcgcggcggctcacgcgcacgcgcgcgcggcgtgcgggcgaggctgagcaggggagcggggagagaggcgctcggggcggctctcgcacgcgcgagcagcgtacgggcgaggccgagcgggggggggggagatgggagagcgcgagagagagagagtgagagagcgcccggggagaggggggccgggggagagatgggccgagcggaaatcggcccatcgaacccgggggaggcaaactagacttttgcggaggaatttggtttggagggattggattcggaattgaactcgacgatagatcggggattgagatcttgagatggcacggacactagacaacaagcaaggaaacaaatttcgcaattagggtttttaagagataattttcccgctaggcgccacgacggaacgggcgctacagaccaacccccctaacaagaatctcgaccccgagattcagcacctaagggagcagctccggaaactcggcgcggagaagatcttctcgcttctaggttgcctcatcttcagaatggttgctccattggactttgtagaacttgatggtcttcgttcgagtctgacgttctgcctcttcaagaaccttggtcggtctttccttgtaggtcagattcttttccagcacgatattacccaggggaacttgctcttctggaactcgaagacatttctttagctgggatacgtggaacacgttgtgcacatctgcgagaccttcaggtagctcaagctgataagccacttcgccacgtctggcggttatgaggtaggggccgatgtagcggggtgctaacttgccggacatcccaaacctcctcataccacggaggggtgatacccgcaggtacacatgatctcctttttcgaactcaaggtcacgccttcgattgttagcgtaacttttctgacggtcctgcgctgtctttaaacgttctcggattagcttaacttgttcttctgctgacttgagtatgtcaggaccgaatgccagcgcttcgcccacctcattccagcacaagggggtgcggcactttcttccgaacattgcctcattcggcgacatctgaatgctggcctgataactgttgttgtatgagaactcagcatacggcaaacaacgatcccaagtgccttcgaaatccagggcacacgcacgtagcatgtcttctaggatttggtttaccctttcagtctgaccatcggtctgcggatggtaggccgtactaaaatttagatcggttccgagggcttcgtgcaattgtttccagaaccttgaggtgaactgagtgcctcgatctgacatgatcttcttgggacagccaaatctacatacgacatgggtcatgtagagttctgctagtttctttccatcaaaggtggttttcactggcacgaaatgagctgatttcgtgagtcggtccacgattacccagatggagtcgtacccgttaggggttcttggcaaaccggtgatgaaatccattccgatctcttcccatttccactcgggaatcggtaggggttgcagcagaccagctggcctctgatgttccgccttgactctttggcaaatgtcacacagggctacgtattctgcgacatctcgcttcattccagcccaccagaagtatgccttgatatcttggtacatcttcgtacttcctggatgaatggaataggcggactcataagcttcctttaggatgagatctcttaactccttcttggccggtacacagatgcgtggaccgcaccaaactgtgccttggttgtctatggagaaattggtgtctttcttctcctgtattctttttattaattcttttatcccttcgtcgtctttctgagcctcccggatttgcgactctagggtaggctgtactgtcaagctggcagggacacctgactgtaccacggtcagccttaacttctccaattctctgcacaggtgatcttggtcaggccgtatttgagctacattgtgataggccttgcgacttagcgcatcagcgaccacgttggctttaccagggtgatagtggattccaagatcgtaatccttgattagttccaaccatcttctctgtctcatatttaactcggtctgtgtgaagatatacttaagacttttgtgatcggtgtatacttcacatctgttcccgattaaatagtgcctccagatcttaagagcatgaaccacggctgccaactcgagatcatgggtgggataattgacttcatgaggcctgagctgcctggaggcataggccacaacctttcgttcttgcattaggacacatcctaagccttgtcttgatgcatcacagaagatctcgaaatcttttcggatatctggcaaggtgagaactggggcagtggtcaaccttttcttcatttcttggaagctgtcttcacaggctgcagaccattgaaatttcttttccttctttaacagctcggtcataggtctggctagcttagagaatcctttaatgaatcttcgataatatccagctaagccgaggaggctgcgaatctctaacacattcttgggcgggttccaagcaagtacagcttcaaccttgctgggatctacttcgacaccattggaggaaatcacgtgtccaagaaatgctactcggtctaaccagaattcgcatttcgagaattttgcgaatagttgacgatccctgagcttttccattatcaacctcaggtgttcagcatgttcttcctcgttcttggagtatatcaggatgtcatcgatgaataccacaacaaactggtccaggtattccatgaagattttgttcattaagttcatgaagaatgctggagcattggtgagtccgaaggacattactgtgaactcatatagaccataacgcgttgagaaagcggtctttgggatatcttcagatctgattttcagttggtggtaacctgacctcaagtcaatttttgagaaaactcttgctcctttaagttgatcgaataaatcgtcgatccgtggcaacgggtacttgttctttatagttacttcattcagggctctatagtcgattaccattctctcagagccatcctttttcttaaccagaagcactggggctccccaaggggatgagctaggtcgcacaaaacctttactttccagctcttcgatttgtcttttaacttctgctaactcattagctgccattcggtagggtctttttgcaattggtgcggtgcctggtgccagttctatggcgaactcaatctctcggtctggtggcattcttgttaattcttccggaaatacgtcgggatattcacaaactatgggcaccgactccaatgaggtgacttgtaaacaggttaagatagaccgacttgcggtaggagtgttaggggtaaagcggacttgctttcctccaggtccttgcaaggtgatggacttttcggcacaatctatctgtcctttgtacttagccaaccaatccatccctaggatgatgtccaagctttgcgagtctaggactatcggtttggctaggaagtcaacttcctcaattctaaggttaacttccgggcatatttgagttgcccttatattccttccaggggaatgtactatcattggtacacgcaaattttgggttttccaaccatttcttttcacaaaagcttgtgatatgaaagaatgggaagctcccgaatcaaccagaactattgcgggtatggagttgacagagaacatacccatcacaatgtctgaagcatcctgagcggtttcagcttgaatgtgattcacacggcctcgaccaaagtggttggaagcacgtgaaccttgtccacttgcctgagagctaggacgagactgagctgccgctgggtaggagttctggcagtgctgccattcgcatgccctgagctggtgttggtagggttctgagggcactgtctagcatagtgacccatctggttgcaccggaaacactgaactactgtcggtccctgtggtgacttgaacgaggtaacactgtttggcgcagtattgccactaggggcacgctgctgtggctgaggtgccggacggttcatctgaggacgaggggcgtaacctggctggcggttagcctgagtgaccgactggtggtattgcatgggttgtccgtagcgagggcgaggtgcgcctcgggaagaatttccctgatggttagacttgcgtttcttgtattcttcggtagcctcttttctagcatcctcgagtagaagtgccttgttgatcatatgttgaaaagtggggaaatcatgagcaatcaactggagtctcattccaactgcgattcctttcaagaatttcctgatcttcttctcgtcggtgtccacttcctcaggggcgtaccgagccaacttgttgaacatacttaggtactcattgacactgctgttgccttgcttaagtctgttgaattcttctttcttcatatcaatagcgctttcaggcacatgagctgtacggaaagccatagcaaactcatcccaagcaatgttagtgggttcagggtgtgcattgcagtaattctcccaccaatctgcagcaggtcctcttagctggtgagaggcgtagagcgtcttctcaaccggagtacactgcactaagttgagttttctatcaacatcttttagccaatcgtcagcctcgacgggctcgacggtatgagagaactctggcggacgagacctcagaaagtctgtcagcttggatctattgttgcccacgtgagggtggccatttccatgcgcattatgctgaaaactggctatggctgtggttaatccctgcaagatttgtgtctgaactgccattaagtgctgcatgttgttttccacatgaggtggggaaggaaggcgttcttctccagaattgtgactggcagtgcggtgagagcggtgagattgttccatctctgcattacggaaaactgtgcgatgcgagcggttgctgcggcggggttgctcaacctctgcgttgcgggaaacagtatggtgtgaacggttgctgtggtgagactgctcattagctgattcatgatttgcttctgcttcaactctaccatcttcaaaaccaaagcgggctggtgcacgagctgcacggcgggggcggctagccatctaaactcccagaaaagggcggggtaagagtcagataagcacttaggagggcaaggagcaatagcaactcagatagcacacactaggcataaactggatttttcaaatcataaaaacacctgatacaacgggtgtggacaagtcacagagctacaccgagcttgactgtgcgcacaccacctaggagaaccagactaccaaacaacacccacaacaaacacacgcacgcactacctcgccacgactccaaaagagttggcggcggaacaaaagggcctatcacacggacggctgctgaagactgcctcctctactcctcgtcggcctggctgcctcctgtagtcggctcctcagtcgaagaaacgtcgatcggctggtgcgaagggaccggcagaacctgtcgagggccggcagcagcacgggccgctggcggtgggggagctgggtggcggaaacggaacacggtggaagaaccaacaacacgcttccgcgcggtgcggataaagcgtgggccacggcgggaggaagcaactggggtgtgtccgggggtgtaggaagggctaactgggtgtgggtagggggagtacactggtgagtatggcgcacgcgagctgggggagcgcgggccgctgggggtgcgggcagagccgcgggagctgtgggaggacaggtggctggcgtggcagaggcgtcctgagtcccaagagatagtgtcaactgaggtgacaccctcctcggccagacgggcctccaaggcggcgtagcggcgggcaagggagcggtaagcctcaaggagtaggtcgtgctgagtggcctgagcctccgaaagctcaaccatgcgagtcagcactggctgagactcgctgtacggacaagggtacctggcgtcttagtggccagagggaaggcgtggaagctgccggaaggcggagcctccgagacggtggctgtagtcgtgggacaggcgacgaagcgccgtccaggagaggtcctggtacgcgatctggagagtgggcctggccacggtgaagtggtgtgggcgaaggccagctccgtgtatacctccacgggggtaatggtacacagagagctcacagtgagggggaacacggtccacggagtaccccgtgtactcgggacacgagaagccaaggaaacgggagaggtcacgccccgaactagtcccgaccggaactagcccgtgacactccaaattaacctgttaatcgataccagtcccaggaaacagtactggtatcacagggagacagaatatcacagcaacagaggtctctttattatagagtagttgtacagtcatgttgggctgcggacagatcccgagctcacaactgcattacaaaaggaaagcggaagccaggacttggaccaatcaacacaggcgcgacttgggaactaggccgaaaccctaaaacacatcgtagccggcttgctcctagaagaactcctcatcagcaggatccgcttcatcttcttcagcaactgggggggggattatttatatagagcaagggtgagtacgggagtactcagcaagccaggggaaataagtgtttaatgcaggcttcaaggaaaggctgttgttttcgtaaatgattttatttgaactttttttctaaaaacatctaggtgagtgcttctcaaacgacatggttgagacagtgcgtcccgtccggtcggagtatgtgcaatgtatcagtctttagaatttaaacaaggttggcacccggccaacagctttttcaacggccacccgggccaacaactcttcaaacggccacccgggccaacaacttttcaaacggccacccgggcctagctgatcccatcagctgcagatttttcaaataccgaaccccttttcacacagcaatttcacaagcagtagtcaaaccaaactacgctaggaatcacctcacatccgcccatgaccgtgggcacggctgttcgaacagtttgttaacctctgcagagggggtacactttacccacacgacattactaacccggatcacccatcccgtggggatcagccacgtcgggagacctccaagctttcatgacaaggcatttccaaagccgacacaggcttaccatatgccgacgagaggggtcccagaccaacaacaggttaggtcccagaccatactgtgccaggaagcccaggggggtcctctccgacaccaccccggcgaatccacatgtctctcgacatcatggctcccctgataagctagttactcagccaggggtgtcccattccacctatgtggtcgtacttgtcttatgttcggatgaaattccaaggaatcggtccttaagtgcgggagcgggaaaaccgtacacccgtacgttcccggtccgcggttttagaaattcatttagttcgcaagcaccgacccaggtgtcgggttttccaagtctttttgtaaaactccaattttacccaagttgttactcagattttaagtttgaaggcgaccgtcgatacttgcacagggtgcacgagtatcgaggcacaactgggtggttacaaggggacatggtatagcaattaacaaaggaaggatcaaatgcgacaaattaggtaggtccgccaatctgccttgcagacgggacaaacagattaagtgcgatcctatcaatgcataatatttagcaagcaacataattaaatttcaaatataggctcaagatgttcaaaggtggcttgccttgctcgagatccggagcttgatcctcgaaatcctcgcactgcgggtcttcgggttccgaaactacacgcgaaacgggacaactcaacaaacggcgaaaaaaataaggccctattaatgacctctaagcgtgccattagatagatctcgagatttagggaattttggaagttgaacggagtcaacggatttacggttgggaaggtattgaatttctaagattattgaatttttggcctaaaggaaacggatttaattaaatcctttttggaaaagaaaagaaaagaaaggagagaggaaatttagactttcctcgggcggctagggtgcggcccaagggatttggggcggctcggccgagcttaatgggccggccggcccaaaaggcggcccagagcgcgcgcgggaggggaggagagaggggaccggtggaccggactcaccgcgcgcggtcccgggtgggacccgcttgtcagcggctcggctcaccgtgcggagggagcacgcggtgcacgcgcgcgggcggggttgggacgcggtgcacgcgcgcggtttgcggtggacgcggatgcggcgggcccacgcgcagcctcacggctcgcggtggaacgcgcgcacacggagagaccgaccggggttggcccgacccggtctgggctgagctggcgccgacgtggtgcctacgtggctgccacgcgggccggcggaaggtagacgacgatccggccgcgaaaggacggcggacggcggcggcgagcggcggagcgaaccacggtgatacgggcaaaagcgagcacaccgggcggttgttcgtgacgaggggagacgaaccaacggctcggattcgccggaggttgctcgacggcggcggattgcggcggcggcaactggcggcgggagaaggggaaaacggcgacgaagctacgaggggtcgattcccggcggtgagagcatctacgcggcgtcgggaactcgacgctagcgtcggattggacggaactacgccgagcgaggctggcgacgtgcgggtgctacggggctcgagcggcgacggcggcgagcacacggcgagcgaaggcaacggccggggcggcgccggctaactacggggaggctactcaagctactaccgaaagctaggggaaggagatggagcgaggaggaagaacgaagagaggcactaccgtgcgggacagggcgctgtgacgagaggccgacggcgcgggagtaatctctccggcctcgggccggggaagaggaaggagagggcgcggccggagtcctccttcctcttccgcgtccttgctcgtgccggctcctccgacacgcgcaacgacgatcggcgacggcgaaatagagggcggcaatggcgtggaggcgaaaatgagggagtttggagggggagggcttgggcttaaatggacggcaatgtcggtttgggagaggggaaccgacattggacggttaaggcgcgagctggcgctcggcgcttgcagccaaagcggcggcaggaggatgacgccggcgaggaggaaaaggggaaaaggagggggagaaaggggcttgcccctttgccgattcgggaaaaagagggggaggggaacgggagcatcgcggcagagggaggaggggcgcggctccatcccttggcggcttgcgcgcggaggggcgggggccgggcgatgacggcggggcggtttggagcggagcggcgacactggcgacaagcgcgtgcagaggctgccggcggcggcgatcgggcggtcggccaccacggcacgcgcgcgcgggaagcaacgggcggcgtccgcgcgggcgcgcacacgctggctcgcgaggacgagcggctgcgcggctgcaggcgcggcagagcgaggggaaagggagggggcgctcggcgcggcggctcacgcgcacgcgcgcgcggcgtgcgggcgaggctgagcggggagagaggcgctcggggcggctctcgcacgcgcgagcagcgtacgggcgaggccgagcgggggggggggagatgggagagcgagagagagagagagagagagagagagagagagagcgcccggggagaggggggccgggggagagatgggccgagcggaaatcggcccatcgaacccgggggaggcaaactagacttttgcggaggaatttggtttggagggattggattcggaattgaactcgacgatagatcggggattgagatcttgagatggcacggacactagacaacaagcaaggaaacaaatttcgcaattagggtttttaagagataattttcccgctaggcgccacgacggaacgggcgctacactaagctgccatcagctttcctcttcactttgtatacccacttacaatcaatgatatttttgccttgctgaggaggtacaaggtgccatgttttgtttctcattaatgcagtatactcaacatccattgcatttctccatctttcatcagttaaagcctcatctaaagtttgaggctcacctgtagcagcaaacccagtatatttatatggaatggttccatcagtatataccttaggtttgcggattcctccttgcaaccgtgttttcggtgttgtaggttctccccctgtctcaggcatcagtatcgtctgctcgacagtactatcatcaggagtactacttgcatctgcagcaggagcactggtgtcaataattatattattcaccggtgcatgcgtcagggagggagtgccaacagcttctccctctctttctgttgatgtggacgcgcccggttggtcagtaccgacgcaagtatgcgacggtgttgcagtgccgctatcacttccatctatctgcatggagctgtcgcttccatctggctgcatggagagttgttctgcttcctgcacaccatcacttgcacccagattttctgcattttcactaggagcattagtggtattaggaaaatcaagcacaggattatctatttgttctcccccttgatcatgtgcaactagagagggtgaaagtgatgtaatttctgcacgcaaccgtgcacctgcattgggcttgaggctagaaaaaggaaacacactttcatcaaatataacatctcgggaaacatatatccttccagatgagacatcaaggcatttaaaacctttatgctgtgtgctatagccaagaaaaacacattgcttcgaacggaactgtaatttttgagaattatatgggcgcaaatgtggccaacatgcacaaccgaaagtgcgaagagaggaatattcaggactttggtgaaacaatcgatcaagaggtgtctcaaaatcaataactttgttaggaattcgattaataaggtaggaggcagctaggaatgcctcatcccagaacttgagaggcatggaagcatgggctaaaagagagagaccaacttcaatgatatgtctatgctttctttcagctgacccattctgttgatgggtatgaggacatgagacctgatgggagatcccaatttggcgaaaaaagctatttagtttttcatattctccaccccaatcggtttgcatggagataatttttcgatcaaaacgtctctcaactagagcttggaattcatggaaaattttaaaaacatcggctttgaactttaaaagataaacccatgtatacttgctataatcatccacaaaactaacataatacttctttcctccaacagaagtgggtgcaggcccctaaacatcagagaaaatgagttccaaaggaaagttagagacactattagacttatgataaggtagctgatggctcttggccatttgacaagcatcacaaaccgactctctactttccacaccttgacatggcaatttatttttgctaatgactcgagacacgataggattagcaggatgtcctagacgaccatgccaccttgcaaaagacggcaccacagcatgagcttgttttgttggtgaagtggatgacgacgaagtgggcaggggggtagaggccttggcgacatctcccctcaagcattgtggtcctcatggctcgatccttaaccaagaaatatttaccatgaatttcaacaaaggcagagttatcggaagcaagttttgatgcggaaacaagattttttgtggcttgtggaacatgtaagacatttttcagatgtaaattgcgcatgggggtagaaacaaaagattgacctatgtgcttgacttccatacctgctccattggtggtgtgcacatgatcattacccttgtatttgtcgcggatggaaagtttgttgagctcgctggtgatgtgatctgtggcaccggagtctatataccaattggagtcagctccataggcatatgagactgctgctgctacatgacgctcttccggcacatagttctgatcgaacctgtgccagcagtcagacgcagcatgtcctcgcttgaagcacacctggcacacaggccgggtgtcattgcggccaccgccaccagtccggccgccacggttggcgccagcgctcggagctccacggccgctgccgcgatttccacagccaccgcgactggagaagccaccgcggttgcctcgccctgctgcattggcagcgatttctgctctcctcatctcgagcctgttctcaaaacttaatagttgtgcatatgcatctgacagtgtaagtggttcaaccctagcaactagagccgaaacaataggatcatattcgtcatctagaccatttagtataaaagcaatcaattcttcatcatcaggtggttttccagacgctgcaagttcatctccatatgccttcatcttaccaagatattcagagattgtggatgaccccttctttgttgtgcagagtgatagccgcacgttcatggaccttgctcgagtcttcgtagtgaacataccttgaatcgcagcccatccttcaaccgccgtctgcaccgtggctacctgagacaagacgtctcgagataacgaggagaagatgaagccgaggacctgttggtccgcagcgaaccactcgtcgtacgccgggttcgccatcctgacgatcttgtcgccggtcttcttgtcatctgatggagtcttgtcgatctccttgggaggaacttcggtcttgccggtgatgtgtccctccagtcgtgccccacgaatcgtcgtgagcacttgagctgaccacagttggtagttctgcttgttgagtttttcggagacatgagatccgaatagaggattggtttgggaggtggaagaggaagaactggccatggtggatggatagattggatctaaacttcagagctcttataccatgaaggaaatcacgagaactggagtaacgtcgcccttcacgctagggtcaacggtgcgtgtttcacttagtgcacaaatcggcacaggtaagtacatatatatgcatagacttgtgaggctcggctggggttgtttacataacaaacttgatcttgtctaactatctaaaccaccggccaagcctcatcttgtctatgtttgttacatgggatagtatctctaacactcagtgcctctcctccccatccggcgccggaaacggattccccgagccccggagatgctcccgccgccctcaatcgatccctcgttaaccgccgccgtttcccctctttgctcgccgccggtatgcgccgccgcgattcgtcgccgccggcctccctccggtgaatccgggccggtggttcgctccttattgtccctcccgtcgctccggtgacctccctctcccttgaatccccgtgtgctgccccggcgaatgtcgccgccgtccgccgtccatccggccacggcctttctccctcctcccgctcgccagcgtggccgccacctcggctttgaccgagccaagtcggtcagccgcctcctccctcccccaccctcacgcgcgcggtccacggtgcgccaaccggctgcgcgtgggcccgccgcatccctagtccatccggtgcacgcgcgtgaaccgcgctcacccgaatcctagcgccacccttacgtgcgcccatccctccatgagtcgcgtcaccgacaagcgggtcccactcgggacaacgcgatatgagcccggtccaccggctccctctctcctcccctcccgcgcgccctaatgggccgtgtctccttaggccggccggcccgttagctcggccgagccgcgcctcttctctcgggccgcgccctagccgcccgagggaagtctaaatctcctccccatttcttttcctttttaaaaagggtttaaataaatccttttccccctattccgtaaatcaattctttattccaaaaattccatgaatcattttccttggttccgcacgtcagtgactgtcaataatattcttgagaatattatttctataaattccataaaccattcctctcattctagaaattccaaataaacttccgaaatccatatcttctcaaccgctcatccgattgactccgttcaacttccagtaattccgtaaaattaagaactatctaatggcactattaattagtctaaatagggtctttcttttgatcttttgtttaggtttttgattgtttgcgtatagttgcggttgcggattttcatcaatcaaggatttctcgaagattcgtgaagcttcgtgaagaccttgagcaaggcaagtcaccctttgaccaattgctcctataatcgaaaaaatcattattattttgtttgcaacttgcattattagaatcacccgtttaacttgcttggcctcggtttgcatgccaaaccgacagacctacctagtagtcgcactaattcctgtaggctatactaccctgactccttgtagctccacctttgtggtacctcggtatccatgttctttgagcgcgtataccaaatatcctacatacaccgttgtttgtcgaaaacttgggaaatgggtttgagaagccttgaaaacccaacatgtggtgtcggtgtgtttgaaaataaaataaattgtgaaaactcacgatgtgggggttgtgcctatgtggcactgtcccgtattcgcatataaggaccgattcctgtgggaaattcatccgagcatataacaagtgcgaccacatgggtgcaatgggacgcccctggctgagtaattagctaatcgggggagccatgatgccaagagacatgttgattcaacggggtggtgtcggggagaaccctcgggcttcttggcacagtatggtctgggacctaacctggtgttggtctgggacccctcttgttggcatatggtaaacttgtgtcggctttcgaaatgccttgtcatgaaagccttagggtctcccgacgtggctgatctcacgggctgggtgatccgggttagtaatgttgtgtgggtaaagtgtaccccctctgcagaggttaactaactgttcgaacagctgtgcccatggtcatgggcggatgtgaggtgtttcctgtagcgtagatttgtttgcttgtgctttgtgaaaagttgttgtggtgtgggaatcgttaccagaatcagcctatgtggcagatggatgacctgagtggtcaagaaacgaatctgtgtgattcgggatgtctacgggcatcatagactagacttctcgagcggaagcggattgttgtgctgctgggcagctggactctgggagtccgagaacatgaataaggctctgggagccgcttaatcaagtgaaatggctctgggagccgagaagtaatgatctgacctggggggtcggtacattaccaattgagttgttgaaaaacatctcttaaagtcgaatcgagacgcaagcctcttttcggcccaaacttagaaagaagtaaaccacttagtgatttcaaaatgatttcaaaacaaaagatttgcaaaacaaccttgcctctcttccaagcttgcattaaacacctaaattcccgtgacttgctgagtacgaaagtactcacccttgctctatataaatatatatagttcctccgtcctgaagttgaagatgaagtaaagtgaagattagggtttcgtcctggttcccagccgtcgcctgtggtgttgggtattagtccgttggttccgctgctgctgctgttggtgtttcctcgtccgtatcgtcggttgtattctcgggctgtcttgagctgcaacctaagttaaggtaaataagtcctctatttattttaaggattgcaatgattcatatttgtcaccgtgggtaccaacgctatgtcctaggattggtactgagatcgcggtttcgtaggaagcggttcgcgccgtttttcctactatacactcctgtcaggtgccgttgtacggtggtgccagattggggtgtgacacaatggaatgtgaggcaagatttatgatgtcatttcattcgcccttgtatgataaacacgactgcaaaaattccttacaataattgattgcggagcaataagaaatagccttaagcttaagactagcctttactagcttataactcatccataagaaataaaaaagtgttctttctcttacttcctttcatcatgtttatgtttgtgtctgcaagctttactattctggatatcttttttctcgtgggatccaccttatggctttacgtactattttgtttttattcatagaacaccatgaccagcgtgagatctcaattaagggtcgtatgacctccatacattgaggatgcccatagacgattatgctgctaagaagcatgcgaacgaaacaaaataggagcagcagttctgatataaatgcagccgaataagcaccgaatctgacgttcctgctcagctagcaccacgaacgtgaagaagccaagccgatcgaaggatggctgccgtgtcgtgtaatcgtgttcgtgtagaaccacgtgaagaggctgcataatttaagaagctgatcctgaaaatgtttgagaaattcacgaacttcgatccctcgagtcagttatgaaatcttcagagttccggctatggatgtatggaactcatcgagtcctctcgtttggcgtttggcgtttgtatgggcctaaaactcggcctgatgatatatatgggcctaaattttagttcgactttcttagcctatgccggatctggccgggattgatgagacccatccaaacaggtaagatcgtaacagatgtggaataggtccgttttgctttccctatctttgcattgagtttaaatcgcaactctgaatcactcaataatgagtattttttataatgtaagactttctagcatgcattgtccatgaatgtgagcaatgctagaaagttttacattgtgaaacgaaggaagtagaaatcttgagcacctaacttgtaaaacgggattaaattagatcctctgaaagtatagatgattggtttccctgataaaccgaatgatcaaacaagatagaagcacatgtcattactttgccatgtctcttgtcttattgatgtcaaaggtactagacaaagacggatagacggaggcacactataccacatttacatagaagaggaactccttttctatagagcattaactatatttagtactattcaatttcataagataataattagtacatgcttttgcccactgattgatacttgagcagatataggagtggggtacatgtagtaattctatactaaacttctctagacattaattaagtataagaaacagggtttatgattctgagatggtcttccattttgggctctagcgaaatgacggttttcgcgaaatctagtggaaagccggtagattccgaacaaattttataaagcaaaatttgaatacaaattccttgactttaccagttggctttgatgaaattctgagtgaaatcatcgaaatttcaattggtaactagaaaaagaggtgaactgaaagtgcttttcttttttttaattcgttattcttttctctcttaccgtaagttttagtaaatacacgaaatatattatttttttcgaaaatttatatcccaatatgttatatgaatatcatactatatataatattttatttgatattttccttttttatcaattcaaatttgaatttggatataattcattgaaatctcagacggtatctactttcgagccttatcgaaaccttgaaattttacggaatttgaccggtttttgtcggaattgtgaaccctattagtatcgaggcctttacaattatgcttaggccccattctaaactacaattccaaattattttttcgttagcgtgtccataactgctaaatggtacatttatttttaaaaaaattatataagagtttctaagagaagaattaaacaaatttattttaaagattataataattgatactcgaacacaaccttagttgagattacagtgtagtagtcatcaatcctatacatgtgagtaaaaaaagttataacatattttatgtatgccaaactaaacaattctcaagttataaaatgtacaagtgtacaaacacagctaattcgataggtaaattaaaacacaaacatgacttggatcataggcaaacagcagctcactacaaccaaaagacacatttacagttaatcatcactgtttatttctgcaatcctccacccatgaaattaaacacactacacctcttagcttccaggcgtaaacttcatgcagatcggtggcttaatcttagcgagagcaaggatagaagaagggaaggtccaaatgccatcgccacacatgagcccagacgcaacagcaggcaccatgaaggcagcctccttcttgttcatcttgttccaagcaaacagcaccaggctcccgacgcacatgtcgatggcgaagctcgcccctacgaggaacggcacggccatcgccgtcggcagcggcacgagcttcttgtacctcgccggcagggcgtccctcgccacgttcgtgagcacggcgaacgcgaagaacccgacggagagcgagaggcagtgcttgggcagcgccgagatgccctcgatcccgaggatcgccatgttgcggtagatcagcgcgtatggcgccttccagtagccatcggggttcccgatgtcaaacgccctgtagaacagcatgaacgtcagtggcgcgatgaagcagccaatgcctgtcccgatgagctctcccacgagcatggacctcggcgatgtcaaggtgagatgtcccgtcttgagatcgtgcatcagatcggcagagacgagcaccagctgcttcaccagggtgccaaccacaaggccggctatgacgccattgtccttgccagcccaagctgcaaagacgaagagagcgatcttgccgtagttgtaccccatgttgatgtccgtgagccctgctccgtaggaattggcgaatcctagcaccgggccgagcgcgtaggctatgatcacgtagtaccacttcacttgtcgaaacattatcggtatggtgattaccgcaatgatgcttagcaagaagtaaccactgtatgccatccaagaagggacagtacccctcttgaatacctcatcacgttgtagatcatctaatgaaaccatatcaccctcctctgatgctgcaattcatttcatttagccatcattaacagtgttatgagtatgtgaaaattaaggtgatggaagagtgtgagaggcattccatttccatgtagttgaatttgcaatggtttcattttctcacctgtgttgctaacactttttcggttaaatctattatgtaaactcttagcagtgacaccggtaactttaacaaaatggtacaggccatcccccataatcagagcaatgcataaaaacgactgcaaaaggagcaatttacataagttatctgatggttttgtaagtagtatctgcttttacattaagcattgagaaaatatgagaccttgtaaccatacaaacttgtcatgctgctttcaggtatgtttgcagggtaccagtcccccttatgtttgctgataagtggccacattattccccatgaaatgaccgcaccaaggagggtagagaggttcacaaggtgtgagcaaatcatccccgcaccaacatatgtgaggctaaaatcaaagaagaatctgatatccaaacaaattcagacttagaaaatttgtcaccgcatgctacaatttatataaatctgtgatgaacaattaggaaattagcatataattcttacgattgtttccaggctttcagaccaaaagtagggaactgaacaaatccacaggcattgcctcccgtgtagaaccattggaagaagctccaaaataagctaagcccaaaatattttagaaacccatggagttgcaatctgtcatgaatgcagattgcagaattagttcatttagggtcaacgactgtctaacaagaataatgcaatgagcacaattaattgaggtgaaaacacgtatactttgcattcttatctccttgggctgtgtggaacccgttgataagaacagctgttgcagttccacttggataagttaatttgtagtctacgaccaaagcctgaaagcatttagtaccaattaatttagtaggaatagataattgagacctattttttatccttaaaaaatgttttgtgtcacatcactacttatataatgctactgtagtccatgaatgttcccatcctttgggctctgcttttttttttttacattgctgccacgtaccaactgcatcttggatttgttatttccaaaggtttttttttacttgattgcattttcttactgagtttatgacagctttgtcaattgtcaaccaactggctttagaaattaggagagggtggcgcagtttgaaacagatcattattgagcggattattgctacgaataatctacttttatatgtatgtatatatatatatatatatatatgtatgtatatatatatatgtgtgtgtgtgtgtgtgtatatatatatatatatatatatatatatatatatatatatatatatatatatatatatatgtgtgtgtgtgtgtgtgtgtgtgtgtgtgtgtgtgtgtgtgtgtgtgtgtgtgtgtatgtatgtatatatatatgtgtgtgtatatataaagaaaatattttaataaataaacttaacaaatctatactgctttaaaagattgtggtggtagtgttcagccaccaatccaccaccaacaactatcatgtaggggtccatggaaagtgagataacactttgattttttttagccacctcacacaagagagttatgataactgaatatcctttttaaggaaattttattaatctatgatatattagataatagggatgacttttctaaaggctctaaaaatatatacaatgaattattttttaaaagtgatccaaacagtacactagtagaaagttttatcagaaaacacaattttcaaacattaagtaaataatttgtttcaacaattctataaacaattaaaaagaactaaccgaagtggatcaaattaagggaagaaaggcacacctttcttaggggaatcaagctgaggttacccgcgaagctaatagccaggaggagccctaccatccagccaatcccaggctccttatagctccctggcacattgcctggtgagttcccggccagctcgtacgtcctcttgttcaggcccagcaatgtcgatccgaacccacctgcatgaaccactcacaccgatcgatcaatacagagcacagatcaacatctatgtgaggttcacattctcggtgtaaatttccaaaatttcaggttttacggtggtatcggtacaattttccaaaatttcactaagattggctctgcttaaaaaaaaattttgaaacataaggcggaatgaactttgttccacttttatatttagaagaagagaattgatacagtttataaggaaaaccggatccgaaaaccacacaattgcacggttaattataaggaaactggctgaaacccaccgctacacaactaacaacgacggtggagcccaaagcttaaaaaaaattcgcatatgtataaattagctaaaatatgtttcaaacttcaagaaagttattccaaatttttgaatttcggtccttttttttccattttgaaatataaaaccctgcttagagtcaagttattgaaattgaaaaacatttcaggagtactgatagaagcgaaattttagaaattgtgggaatctcaagatgttttggacgaaattaaatacttaaatttaaacaaaatttatttaaatttaaatgttttcttgaaaaatggccgaaagaatattctattggaggatcaaaatttcggaaattccgttccaaaaatggaaccctctgcctatatagtaataagagatcgacgcagaggctgcagcccggcgacgtaccgccgaaggctatggtgtagcaggcgacggcgcaggtctggacgacggtgttctcctgccgcgtgaagggccgcggcgagaagccgaggcgctccagcgcgcgcgtccagccgcggagcgcgaggaaggcgagcagcgcggcggagatgttgagcgtgggcaccagccccgtggtgagcgcgatcttcatcacgatgacgctgaacacgaacccgatcagcgccgccgccaccaccccgcgcgccgtcacctgctcccgccacggctgcagccgctccatctcccgcgcccgcgccgggtccgcctccgcgtcctcgtcgtgcaggctcccgatctcgggcgccacccgcgtgcggtccgcgtcggcgtgctccatggcggcggcggcggcgtcgatctcgcttagctgctcgatctgcaccacgaggacaagaaagaaacacggaattgattatctcctcttcagcgacgtcgaattccgacgagcattatttgggccaagatcgatgaacacggcaggatgcttcacctcaagttcgcactgctcgttcgatcagtgcgccaatggaacagttgctcactgctcaacgtgagctctgcagcttgcaagttcgagtgatgcaggggtgatgctaactgcgatcgatggcatgtatttatacccacgagctctggaaaaggtctacgatatacgtacaagattttttgtgtccaatttgtcacaaagaaattcccggattacttttcatgcgttggactagttttgcttcttctataaatgtttgctgcagtagagatgcacacacaaacgcattctatctgtgcttcctcccaaatcttatcgttctactatagatatcctaatcgcggttccatttgactgagcaccacttgtctaggaactttatattcttattgtgtatcactatatattacgtaatcagtggcggcacttttcttgccgtcatatcattgatgtggaattcacttcggcaatgctctactcatgattttgttgaatccgaagctgatgatatgtaccgaggaaaaatgctcactaatagtacggcaaagtcaaaaccccaatatggttagttcttgtttttcttaataagtgctctaataaggaagcggaatcattaaaccacaagtgtttcatggcagtgcaaaaaaaattaacgtggtcaacttcagtttatagtaagctcgtaaattaacctgaaagtaacttttggttgtacattaacctgctattttttaaaactttttttaacgaattgacgatatttttttcatagcttgatttttacaaactttgaaccgggaaaaaagcatgaggaaattcagcaaaaaacattgcgatggagaatctggagacatgctagatttcgcactacaaaacttggcatgttttcctgttaagccggctctaggcctctacttatattaagtgatcaatattcatagagtaacagaatatatatactccctccgtttcaaaatatttgacaccgttgacttttagtacgtgtttgaccattcgtcttatttaaaaaaattaagaaattatttattcttttcatatcatttgattcattgttaaatatattttcatgtacacatatagttttacatatttcacaattttatttgaataagatgaacagtcaaacatgtgctaaaaaatcaacggtgtcaaatattttgaaacggagagagtaattaactatttttgtagaagactatataaaaataaccaaaaccacactgacggggttatttgatgaataaagcaagtaagcaactgcagctttcggaatgtcaaacgagagagaaaagatgcttatcacgcaacgccaaatgcactaattcaataagtccgcggagtcaaatgctatactatatgcatcatggttcatcatttcctggcataaaaaagagtagtagaacagtacgcccatttcatgccgctttgctcttagtcttagtggcctatgccccttgaaatgatgggttgaggtatcaagcaacaaatgcttttgtgctctctcttttgattttaaaccacgattcaaggatgaatgacaactaattgccctctttaagcgaacctggtttaagaacgtgtttggttttaaaactattttttgagatgaatggtacacatgtctgatgtttagaggacttgtttggctgaaaatcatacaaaattttggtagtgccggttggcaagttttagcactaccaaaaaattagtaaggtagattttaaaacccatttgaattgatgccaattagacacatgtatatgggtaatgccaaattgttttgtgaggtatcaaaaccaaacaggctagaatgtttcagtaatgccatagccttgcctgaatacttggtttcggcccaaactatgaataaagaaggaataagtttatctgaaatttgtcaacgaatctgattttcatccttcaacctgaaaaccagatacaacggatccctcgactgttaaaaccggtgcaaaataagtcccaatgcagtttgtatggcggttttagctagcgtggcgcctacgtcccaagaccgagttaaactagccacgtaggcggcacgtcagccaaatccgtcttgggacttatttcacaccggttttgacaggacccattatatctggttttcggattgaatgatgaaaatcaaattcgttggcaagttaaaaacctcagatgaacttagaccaataaagaagtgcggtgcggtgctgggctgggcggcctgcttgctgcccggcaagccacaggcccacaaacaccgaagccggcccgcctcgccgcagacgttcgcgccatcctccctcaacaaaaatggaaggcgctgcttccagctgtcctcaagccatcctccaccggctactcgacagcgcaacctagctaatcacctacacctactgcgcagcgcagctttactgcttaccatctccccttgccaattctgttttccgcttgcattgtcacgatggagaagagggaatgagggatggagggcgagagaggtcgggcgccatggacgggggcttactcaccaagggtcaaccggtcgacgtcgcgcttgacgccgcagtgggtggcgagccgaggagatctcaccgtgcatgcaatgcagcccctgtggtggctcgggaccgggaggaggggaagccccgggcgacgtgggccgaggcgctcgccagctgttcgatgcaatgcccacgcctgcctctggttcatgtgcctgtgggaggaatcgagggggtggagtagtcaagtgagatcacagacttccacagcttgtttcaggcaatgaggcaagtgttagtcatgattggcatagcttctttatctgaaagaggctatgaacttatcatggcatcttgtgactggtatgcagataacttgagagtatatgatctgaaaacttacatggcatacacctatatcataattcataacttacaagctcaaattgtcaagtgctgatctacagctagactctgaaatgctactgctcattatgtagtttcagtggcctggcttgctgaagtctgtgtacaatacactgactggtgtcagcccagagttaatttgcactatggacactcttctcctttgctggactagaactctggaagataataaccaagtcactgtgagctcatgttttgtgaacatcaagtgctatgggttgccaagattgggtcggatttcccagaaggacggaatattgattatgttgatcatttggtggccataatcgaaggtcagcagttcttctagttctattttcgtaaccaatgagttaagtcgttaagatattgatcgatactaagggcatgtttggttggttccccgtaattagccaaactttcaagccacatgttttgtatgatgcaattttggtggtggcaaaagagctcagtgccattgtggcaaagtttggctaagagatgagcctgttgtggctgtgtacatccttcgggatgtagaagtcgggttttatttaacccattatctaaaaacgagatgaacctgtggcatgtaaggattggggataggaaaaggtggcaagtattgggtgcaaccaaatgcttccaactgtacgtcaaacttgcctaaattgtgcgtgacaagtttggcaataaaccacaaacatgccctaaaattcatgtttactagctaaaaatgtttttctgccatcatgttccgttatgcactttacgatgttgcacggtggtaatttctaagtattcggtgtgctttgtgattagtgtttagtacatagtgttctcttctcaaaaaaaaaaagggaagaagaagaagaaggaagtacgtagtgttctgtttttttccatgtgggcagagatccttttccaagccagtcaaaagaaatatatactacagcatagtaaggttgtgtttagttcacactaaaatttggaagtttggttgaaattggaactatgtgactgaaaagttgtgtgtatatgaaagatttgatgtgatggaaagttgaaagtttggaaaaaaactttggaactaaacagggcctaagcttaaaaaagagacacatgaaaattcttaatcctaactattcataattggaagcaaaattatgactcacatgttagattctcccatgagaaagggaactgttacagttaaccaaatcacttattcatcactaataaagaaaatattaaaggggaaaaaggacaatttgttgaagaaaacacaggagatcagtttaagttttaccttacaaattacaagaaatcaagaatagagtgcaacatcatatttcatactaatggtagcaggcaacattatttcatactaactgcaagatttttagtccatgcaaatatcaaatcaatcacaatttttttcatacggaaacattttcagagtctacattcacaagttcagaactcgtaacaaaaaagagaaagcagaattacattttgtatttacaaagacaccacaaagaactcctcacagtattaactgtaagtctgatgtttgactgaacctacagaattgtgtattacaaatctacagtaagcaaaatgttggatctttttaaagtatttatagtgataaaaaagttgactaatggacctacctttacaagcacatcagaataatacagtcaagaacaccaactcttgcagaagtttatgttggagttggagcagcagctgccctcatgagcatgaatctcctcctcgcaatattgtttgcattttcacctagcgcagccaggtgaagcatccgccgccttgctgccgccacagcaacatcatctgcggttggcttcccaggaacctcatgaggtggtgagctctcccctgatgcctcgacgtcaccatccaattcgttgtgctgcatcacttgctttatgctctccaccacctctctcatagttgggcggtcttttgcatgttttgcaaggcagctgttggccaatttggcaatttctctagtgccctgcttagagtaattgtgcctgagtctgatatctataatcctgctgaacctcttagtctcaacaggatactgcctcacccattccaggagtttctgctcgttcttgggacgattcctttccattgaacggcgtccggtgaggatctcatataggacaactccaaagctccaaacatcactcttgtttgtgagatggcctgtctcaacatagtctggagctgcataaccataagtccccataacctgatagcagtaaagaaaattgttcttggtgagctatgaaatccatgttccattatctattttgataagaactggaatgtgcagaagctgcatagaggaattcctttactttgatcaatgaaaataaatcagtacttaccgctgtggacacatgagtgttatctgcagttggcccttcccttgctaatccgaagtctgaaagtttcggtctgaattcctcatcaagtagcacattggatgctttgaaatcacggtatatgacctataaaattttcaagtctgaaacaagaattttctgtgtttcctcaagcaaagtcaaaaccataattgacaggattgcatttttaaggatctcttaaaagccatttacaagctggaggtaacattcatcgttgggagaatagccactatggtccctgaagtttcgctctgagatcattttagtccctgacctttcaaattgtccaagcaagcccttaaactttatcatgtggacatatacagtccttggcccatcgaaaattgccacgtggacatgccatgtcatcttccaatgcaaatatatgatgacatacccaattttcccttacacatatcgtcatagggaaaaaagagagaaagaaaaggagaaaaataataataataaagaagtaggtgatcctgcatattaaatatccgttagagttttaacattgaaatgcaactacttacatgaaatttatttggcatgataattatatatttagtggttgtagctaatttaactttgtattagcataatccagtgaaaaaagtttgccatatatccagtcacattgaataaagtttgtaaattcttttcattattttttatggtacatggaagggtaaattggacattttaccatatattttgcatgagagcataacatggcatgctcatgtggcaatttaagtggaactaaggactatattagcccacatgacaaattataaggactcgtttggacaatataaaaggttagggaccaaattaatcatggagcaaaacttcaaggatcatgttggctattctcccttcatcgttcatggtaatcattttctttcaagtatgtcccattcaatcaatatgtcatatgactcaacggacattcaaaatacttgcaataaaaaggattgagtaatatgtccatccaagctatatgattagattcattccagatctccagtcatgaaatatatagttaactttaaaattcagaagtgttgcaaaaagatcaacataattgacttgcagacaaccattcttgcacagcatttgctaaatcacaacattaatatggtatggctcagggacaccaacaaactgtgaggcctttagcaatataactctattaaaagctgtcctatttcagactttaggggagaaaatgggtaatccgttatgattcagatgaataaaatgaatttcttgatggtgagttgccagcggtgttacctgaacttccaatccctcatggaggtacaacaacccctcagcagcacccaatgctatcttcaacctgatgtcccatgggaggacgggatatgctttattgaatagatgatcatccaaggtcttgttcgacatgaactcatataccagcaacctctgagggcctcgttcactctgagcggcacaatatccaatgagcttgacgagattcgggtgctcaacaacccctagaaattgaacttctgtcagccattgcttgtgaccctgatcagaattgggataggacagaaaaggataaggtaaaacactgaatggtttctaggctcttaaatataagcattgaaatgaacctacaattttaattacatagaaggcatgcatctatgtacaccattagaaactacagaacaaagaagtgagaagacaaaaacattgaaatgatacactaacgccatcacaaatcttattaccgtgttagcaaattccatattatctactagactatacatagttattcagaccatgctcagcttaggaagccaatatgccgcagagttgcataattcacatattagaactaccacaatagaagtcagaagtatgaatgtcaattggcaggtacttataaattgtaaagtactggctagtgatcagggattccaaaagtttgagcccaaattttttaattgaaaaacagctgcattttctttgtttaaaatttttgggtttaaacttcagtttgataatttttttctagtgattatatactagtaatatagttggattaacccggacaacaccgcccaattggacaattaaattgcagaggaaggatacctgtcggctgttgggattgagcttttttatggcgacctcggtgccaccggcgggccctccgggcagccgaacgacgcccttgtagacgctcccgaagccgccctcgccgatcttgagcaggcggctgaagtccctggtcgccgcctggagctcccggagcccgaactcctgcagggagctcgcgcccctctcctcgtacagctccgggatgctccgcgccgacgagaccgacccggacgacctgctccacccggcggcgggcctcgccgccgccgcgctcgagtcctcggtcgactggctcgtcgcgacggccgacgacgacaccgtggaggtggagtgggacgagccggcgagcgccgacggcggcggcggcggcggcgctggcccctcgtgcggcggcggcctcttcttccccttccgcttcttgatcatatccctcacgcggccgaagcagcccatctccgaggaacagtaagctggagagagggggattcgggtcagctcgtggtgctcttctccatggccttcacctcgtcagctcgaatcgtgaggagaaagggagcaacctttcggcgatagaaacggaagccttcttcttcttccttctccttgctgatcggatacaactacaagaactattttctcctggcctccacgaaacacgacaacaaacggagacgaacacgaacgaactcgcgtgagtcggtaaactgacgcagaatcgtttgacgcaagcaaggacgagggaaggatgacaccaatttgtgctgggtgaacaggaagttcgagtgtattttccttgttctttttcccctgggaggcgaagaattttgagccacgcttgctggacaagtacgggagtagtacttgaggaagcaaagaaagcagattaataaaagaggtggttgaagtacaaatctcgaatcgcgggggctcagaacaaatcgtaagaaaaccttgtagggggtcaaacgaaatgggctgaaagtgacaggagaggccgcggatgcaaaactgcaacaactactcaccccggtcgcagctcgacaggcccccacgagactcgtagggaccacctatacatttgtcgataaattttctattaaaaatttgacagatataattatagtacaatcgtagtgtaattacactgtaacttgtatgtaattacactgtaaattgcaagtaactacagtgtaacttgtatgtaagtttcatgtaattttgaatcgttagatctattacaagatttgttctggtgaggaagaaaaaaatcacagcacacacatatgtgaaaggatttgttcccacgacctctattttactgaaataatatgttaccgagagattcttgaaagttacatacaagttacattatagttacagtgtaattacatacaagttacagtataattacactacaattgtactgtaattatatctgacaaatattagggggagaaatttgatgacaaatatctagcaaaatcggactcgtttggtgtattttctattgtgcttagtctttgataaaatccaaccacgttacaaaaaattttgtaggtttaacactaattttgtttgaagtgttcaaacacgtgaacaatcaaccaccaccaaaaagattcacacatagacacgctatggttcgtccatgaaccccctttttttttggaacgataatgccgttgctaacgttttatatatagaagaagatgtctcactctaaggagaaaatgagaccaaaccttatagcgcacagttaattagaaataattggatgaaaaccacaactacaaacaactcataacaaacaaacctaaacaactaaactataagaacacgaaaactgacaaccaggcttactaagtagtgaacccctttttatgctcttgaatgcaagtttatacaagagaaaaactacaacaagatcgagaagtgtacatattgtaatcacgcacaaaatataattaaggtaagtgatatctatatggtattttgctaaaaaaaggtttaacaaatcaatcaaactataaccgtcggatcgcaaaatggatggtccagattaatccttatctcctatataaagttcacttgccattcccaaaaccctagttctcttcctcccactccactggccgccttccgccgccagcatcaattgtccttctctccgctgcttgcctccctcgttcctcgtctttcatggcagcacaaccttcttcgttgcttgcttttctccttccttgactccgcagcaccactgccttctttactatctcttctatcttaccccttacttgtgagcaccgactaccaccctcgctcggcccggcgcgtcgccaccccttgccatccctcttgtccctttctactccaaccccaaatctaaacaagaaaatacataggagaggatggctcatcggacttataaacgacatcgaccgtggttagagcatggatttggacttctatcctaaggttaggatttctattgtaaaatcaaaagttatttttagttgagcacaaaagggatcagatgtaacatatgttagaagattggaatccgtttcaaaatggtgtggtatcaggtggtaccaaatctgatacctatgagtaccagatctgataccaaggtattggtacccacaggtaccagacctaatacctgtgtatcagatcttgtacctaagtattttacatgtaccagcaacaggttccatcctaatgggtcatgtgcaccattgcggagatcgggcacaaccggtgatgtgtctgtgctagtggccagaagcaggtcacaacgctagtgttcgccatggccgtctgcaccgagatcgttgttacggttgtgttgctagttgttattgttatagtgatcatgggggtcgatgttgtggaatcgtgcgggaactgtacaaaggagatcatgttgttgtcctcagcgccaccgttgcattcaatcatgaagcaaacgatggcgcagagggcccgcgagttgcttacgtaatggctatagtctgggttgagacgcgttggagagcaaggtggaggcacacagtggttgccagccagcgaccaccgcatgcgctgcatatcatcaacctgcatcacgtcgatttacagccacatcaccttattgccctggcaaacccgccccttgtcgtcattctcatggaagttgatgtcgcgtggaggactatgacggtggcacttgcagcgggaacacctagctaatactgtcgtgcgctgcgcacgtgatctcatgcactagcattttcaatattagaattcctatttccaattattttatggtcatattttgaacctatgaatccaaaacttcacgattctatcctatgctttcgtcgacatgatgatcaccctctctataatactcctggcatagtacttcctccatcatagaaaaaaggggattcctagttctccaaaacaagaagagtagtgagaagtaaatactaaaatgccactcattaataagaagatagaattggtggttggggtgaaggggtatggaaacttggaaatgatagaatttcgtgatggacccgggtagatgagaaggtataagttgatttatttttggataaagtttaaattttagaagttgttcgctctttttttttactgagggggtatgattgtgtccaatccactgaagggctctcccattttcttggcggaacagatcccctagcaagactttagcttagaaatatatttcctatccgtctagattcgtagtattagaatgtatttcatctatcttaaaacccttatattttgagacgatgggagtatgtactatatttctctctctttcttttttttctccctttcgtttgcaacagtgctcgagacttatgacgaaggaattgctgctcagggtaaatttttgttgctgatgcacaggagggatgtacgggatggtgcatatagctagcatacatatagtacataaatgaatcaaagcagtttttttcccccacttgagagaaagctctagtgttgctgagtacataaaaatgttgacaagttgacacggtagtcgctttcgacataccttgcgacctaaccatgtttgacttcattttccccttgacctttatatatcagtcagtactgtatcatgttgatctctcatgagagggattcatttacgaaggaactgatgttctcaactctccaaacaggaccaggactatacatgactatacataggatgtgcttgttggagtttttggcttatgcagcaaggttgtcctaaaagtcaaactctacattgaacatcactggaatatcccctgtaagcttttaccctttctgcttatttagttatccgttctgctagttatggaaatggtttgccataaatacctaatgatcatgatacttactactatatttgtcttaaagggtgtgtttagttcacactaaaattggaagtttgattgaaattggaacgatatgacggaaaagttggaaatttatgtgtgtaagaaagttttgatgtgatggaaaagttggaagtttgaagaaaaaatttggaactaaactcagccaaagtatactccctctgtcccgaaatatggtaacttaggagatggttagacacaacctattacaatgtatctggactaagaatttttttaggttggatatagttatgaggtactctctccgtcccaaaaagaatcaagctaggaggagatgtgaccggggatgtgacccctcctaagacaatgtatgtggacaccccttatgtccacatacatcaatctaggaggggtcacatcccctattagattgattctttttgggacggagggagtaggtgggcataattaaataggcttatgtgtgattagttgggaagataaagtaggtggaaaattaaatgaggaatgttgtaattggttgataagagaaaaataggtgaagttaatatatttggcacaaaattcaactgctagaagttgttatatttttggacgaaggaagtagtacgagtgcttactggtatttagaatgattgagaaatttgatgaatatcgttaggcattcattcttttatgggcatgagccggatcgaatcctgaatgtggtggatacttgtcacgccccgagctagtcccgactggaattagcccgtgacgctccaaattaacctgttaatcgataccagtcccaagaaacagtgctggtatcacaggaagatagaatatcacagcaacagaggtctctttattatagagtaggagtacagtcatgttgggctgcggacagatcccgagctcacaactgcattacaaaagggaaacggaagccgggacttggaccaaacaacacaggcgcgacttgggaactaggccgaaaccctaaaactcatcgtaaccggcttgctcctggaagaactcctcatcagcaggatccgcttcatcttcatcagcaactgggggggaatatttatatagagcaagggtgagtacgggagtactcagcaagccaggggaaataagtgtttaatgcaggcttcaaggaaaggctgttgttttcgtaattgattttatttgaactcttttctaaaaacatctaggtgagtgcttctcaaacgacacggttgagacagtgcgtctcgtccggtcggagtatgtgcaatgtatcagtctttagaatttaaacaaggttggcacccggccaacagctttttcaacggccacccgggccaacaacttttcaaacggccacccgggcctagctgatcccatcagctgcagatttttcaaacaccgaaccccttttcacacagcaatttcacaagcagtagtcaaacaaaacaacgctaggaatcacctcacatccgtccatgaccgtgggcacggctgttcgaacagtttgttaatctctgcagagggggtacactttacccacacgacattactaacccggatcacccagcccgtggggatcagccacgtcgggagacctccaagctttcatgacaaggcatttccaaagccgacacaggcttaccatatgccgacgagaggggttctagaccaacaacaggttaggtcccagaccatactgtgccaggaagcccaggggggtcctctccgacaccaccccggcgaatccacatgtctctcggcatcatggctcccctgataagctagttactcagccaggggtgtcccattccacccatgtggtcgtacttgtcttatgttcggatgaaattccaaggaatcggtccttaagtgcgggagcgggaaaaccgtacacccggtacgttccccagtccgcggttttagaaatttatttagttcgcaagcaccgacccaggtgtcgggttttccaaatcttttgtaaaacccaagttttacccaagttgtttttcagattttaagtttgaaggcgaccgtcgatactcgcacagagtgcacgaatatcgaggcgcaactgggtggttacaaggggacatggtataacaattaacaatggaaggatcaaatgcaacaagttaggtaggtccgccaatctgccctgcaggcgggacaaacagattaagtgtgatcctatcaatgcataatatttttcaaacaacataattaaatttcaaatataggctcaagatgttcaaaggtggcttgccttgctcgagatctggagcttgatcctcgaaatcctcgcactgcgggtcttcgggctccggaactacacgcgaaacgggacaactcaacaaacggcgaaaataaagccctattaatgacctctaagcgtgccattagatagatctcgagatttggggaattttggaagttgaacggagtcaacggatttacggttgggaagatattgaaattctaagattattgaatttttggcctaaaggaaaaggatttaattaaaccctttttggaaaagaaaaagaaaaggaaggagggaggaaatttagactttcctcgggcggctagggtgcggcccaagggatttggggcggctcggccgagcttaatgggccggccggcccaaaaggcggcccagagcgcgcgcgggaggggaggagagaggggaccggtggaccgggctcaccgcgcgcggtcccgggtgggacccgcttgtcagcggctcggctcaccgcgcggagggagcacgcggtgcacgcgcgcgggcggggaagggacgcggtgcatgcgcgcggtccgcggtggacgcaggtgcggcgggcccacgcgcagcctcacggctcgcggtggatcgcgcgcacgcggagggaccgaccggggtcggcccgacccggtctggctgagctggcaccgacgtggcgcctacgtggctgccacgtgggctggcgggaggtagacgacgatccgtccgcgaaaggacggcgggcggcggcggcgagcggcggagcgaaccacggtgatacgggcaaagcgagcacaccgggcggttgttcgtgacgaggggagacgaaccaacggctcggattcgccggaggttgctcgacggcggcggcaaccggcggcgggagaaggggaaaacggcgacgaagctacgaggggtcgattcccggcggtgagagcatctacgcggcgtcgggaactcgacgctagcgtcggattggacggaactatgctgagcgaggccggcgacgagcgggtgctacggagctcgggcggcgacggcggcgagcacacggcgagcgacggcaacggtcggggcggcgccggctaactacggggagtctactcaagctactaccgaaagctagggggaggagatggagcgaggaggaagaacggagagaggcactaccgtgcgggacggggcgcagtgacgagaggccgacggcgcgggagtgatctctccggcctcgggccgaggaagaggaagaagggggcgcgcccggagtccccttccgcgtccacgaacgcaccggctctcccgacgcttggcgatggacggcggaggcgaggcagagcacgggagcggcgacaacggtgaggaggcgaatgggagaggaaaggaagggagggggaagacgggtttaaaagggtggcaatgtcggtttgagagaggggaactgacatgggcggtcaagccggcgagctggcgctccggctagcgtccaaagcggcgacaggaggtgacgccggcgagaggggaaaaaggggagaaaaagaggaaaaggagggagagaaaggggctcgcccctttgccgattcgggaaaaggaggagggagcggggcgactcggcagagggagaggggctctctccctccgccccttggaggctagcgcgcggagtggtgatacccgcaggtacacatgatctcctttttcgaactcaaggtcacaccttcgattgtctgcgtaattcttctgacggtgtgctgtcttcaaacgttctcgtatcagcttaacttgttcttcagctgacttgagtatgtctggaccgaataccagtgcttcgcccacctcattccagcacaagggggtgcggcactttcttccgaacattgcctcattcggcgacatctgaatgctggcctgataactgttgttgtatgagaactcggcatacggcaaacaacgatcccaagtgccttcgaaatccaaggcacacgcacgtagcatgtcttctaggatttggttaaccctttcggtctgaccatcggtctgcggatggtaggctgtactaaaattcagatcaattccgagggcttcatgcaactgcttccagaaccttgaggtgaactgagtgcctcggtctgacacaattttcttgggacagccaaatctacatacgacataggtcatgtagagttctgctagtttctttccatcataggtgattttcactggcacgaaatgagctgatttcgtgagtcggtccacgattacccaaatggagtcgtatccgttgggggttcttggcaaaccggtgatgaaatccattccgatctcttcccatttccactcgggagtcggtaggggttgcagcagaccaactggcctctgatgttccgccttgactctttggcaaatgtcacacagggctacgtattctgtgacatctcgcttcattccagcccaccagaagtatgccttgatatcttggtacatcttcgtacttcctggatgaatggaataggcggactcatgagcttccttgaggatgagatctcttaactccttcttggccggtacacagatgcgtggaccgcaccaaactgtgccttggttgtctatggagaaattggtgtctttcttctcctgtattccttttattaattcttttatcccttcgtcgtctttctgagcctcccggatttgcgactctagggtaggctatactgtcaagctggcagggacacctgactgtaccacggtcagccttaacttctccaattctctgcacaggtgatcttggtcaggccgtatttgagctacattgtgataggccttgcgacttagcgcatcagcgaccaccttggctttaccagggtgatagtggattccaagatcgtaatccttgattagttccaaccatcttctctgtctcatatttaactcagtctgtgtgaagatatacttaagactttggtgatcagtgtatacttcacatctgttcccgattaaatagtgcctccagatcttaagagcatgaaccacggctgccaactcgagatcatgggtgggataattgacttcatgaggcctgagctgcctggatgcataggccacaacctttcgttcttgcattaggacacatcctaagccttgtcttgatgcatcacagaagatctcgaaatcttttcggatatctggcaaggtgagaactggggcagtggtcaaccttttcttcatttcttggaagctgtcttcacaggctgcagaccattgaaatttcttttccttctttaacagctcggtcataggtctggctagcttagagaatccttcaatgaatcttcgataatatccagctaagccgaggaagctgcgaatctctgacacattcttgggcgggttccaagcaagtacagcttcaaccttgctgggatctacttcgacaccattggaggaaatcacgtgtccaagaaatgctactcggactaaccagaattcgcatttcgagaattttgcgaatagttgatgatccctgagcttttccattatcaacctcaggtgttcagcatgttcttcctcgttcttggagtatatcaggatgtcatcgatgaataccacaacaaactggtccaggtattccatgaagattttgttcattaagttcatgaagaatgctggagcattggtgagtctgaaggacattactgtgaactcatatagaccataacgcgttgagaaagcggtctttgggatatcttcagatctgattttcagttggtggtaacctgacctcaagtcaatttttgagaaaactcttgctcctttaagttgatcgaataaatcgtcgatccgtggcaacgggtacttgttctttatagttacttcattcagggctctatagtcgattaccattctctcagagccatcctttttcttaaccagaagcactggggctccccaaggggatgagctaggtcgcacataacctttactttccagctcttcgatttgtcttttaatttctgctaactcattagctgccattcggtagggtttttttgcaattggtgcggtgcctggtgccagttctatggcgaactcaatctctcggtctggtggcattcttgttaattcttccggaaatacgtcgggatattcacaaactatgggcaccgactccaaggaggtgacttgtaaacaggttaagatagaccgacttgcggtaggagtgttaggggtaaagcggacttgctttcctccaggtccttgcaaggtgatggacttttcggcacaatctatctgtcctttgtgcttagccaaccaatccattcctaggatgttgtccaagctttgcgagtctaggactatcggtttggctaggaagtcaatttcctcaattctaaggttaacttccgggcatatttgagttgcccttatattccttccaggggaatgtactatcattggtacacgtaaattttgggttttccaaccatttcttttcacaaaagcttgtgatatgaaagaatgggaagctcccgaatcaaacagaactattgcgggtacggagttgacagagaacatacccatcacaacgtctggagcatcctgagcggtttcagcttgaatgtgattcacacggcctcgaccaaagtggttggaagcacgtgaaccttgtccacttgcttgagtgctaggacgagactgagctgccgctggagtaggagttctggcagtgctgccattagcatgccctgagttggtgttggtaggattctgagggcattgtctggcatagtgacccatctggttgcaccggaaacactgaactgctgacggtccctgcggtgacttgaaagaggtaacactgtttggcgcaatattgccactaggggcacgctgctgtggctggggtgccgggcggttcatctgaggacgaggggcgtagcctggctggcggttagcctgagtgaccgactggtggtattgcatgggttgaccgtagcgagggcgaggtgcgccttgggaggaattcccctggtggttagatttgcgtttcttgtattcttcggtagcctcttttctggcatcctcaagtagaagtgccttgttgatcatatgttgaaaagtggggaagtcatgcgctagcaactggagtctcattccaactgcgattcctttcaagaatttcctgatcttcttcttatctgagtccacttcctcaggggcgtaccgagccaacttgttgaacatacttaggtactcattgacactgctgttgccttgcttaagtctgttgaattcctctttcttcatgtcaatggtgctttcaggcacatgagctgcacagaaagccgtagcaaactcatcccaagcaatgttagtgggttcagggtgtgcattgcagtaattctcccaccaatctgcagcaggtcctcttagctggtgagaggcgtagagcgtcttctcgaccggagtacactgcactaagttgagttttctattaacatctttcaaccaatcgtcagcctcgacgggctcgacggtctgagagaactctggcggacgtgacctcagaaaatctgtcagcttggatctattgttgcccatgtgagggtggccatttccatgcgcattatgctgataaccggctacggctgcggctattccttgcaagatttgtgtctgaactgccattaagtgttgcatgttgttttccacatgaggtggggaagggaggcgttcttctccagaattgtgactggcagtgcggtgagagcggtgagactgttccatctctgcatcacgggaagctgtgcgatgcgagcggttgctgcggcggggttgctcaacctctgcgttgcgggaaatagtacggtgcgaacggttgctgtggtgagactgctcattagctgattcatgatttgcttctgcttcaactctaccatcttcaaaaccaaagcgggctggtgcacgagctgcacggcgggggcggctagccatctaaactcccagaagagggcggggtaagagtcagataagcacttaggagggcaaggagcaaagtaaatagcaactcagatagcacacactaggcataaactggatttttcaaatcataaaaacacctgatacaacgggtgtggacaagtcacagagctacgccgagcttgactgtgcgcacaccacctaggagaaccagactaccaaacaacacccacaatcaagcacacgcacgcactacctcgccacgactccaaaagagttggcggcagaacaaaagggcctaacacacggacggctgctgaagactgcctcctctactcctcgtcggcctggctgcctcctgtagtcggctcctcagtcgaagaaacgtcgatcggctgacgcgaagggaccggcggaacctgtcgagggccggcagcagcacgggccgctggcggtgggggagctgggtagtggaaacggaacacggtggaagaaccaacaacacgcttccgcgcggtgcggataaagcgtgggccacggcgggaggaagcaactggggtgtgtccgggggtgtaggaagggctaactgggtgtgggtagggggagtacactggtgagtacggcgcacgcgagctgggggagcgcgggccactgggagtgcgggcagagccgcgggagctgtgggaggacaggtggctggcgtggcagaggcggcctgagtcccaagagatagtgtcaactgaggtgacaccctcctcggccaaacgggcctccaaagcggcgtagcggcgggcaagggagcggtaagcctcaaggagtaggtcgtgctgagtggcctgagcctccgagagctcaaccatgcgagtcagcactggctgagactcgctgtacggacaagggtacctggcgtctgagtggccagaaggaaggcgtggaagctgccggaaggcggaacctccgagacggtggctgtagtcgtgggccaggcgacaaagcgcagtccaggagaggtcctggtacgcgatctggagagtgggcctggccacagtgaagtggtgggggcgaaggccagctccgtgtatacctccacgggggtaaaggtacacagagagctcacagtgagggggaacacggtccacggagtaccccgtgtactcgggacacgagaagccaaggaaacgggcgaggtcacgaagctgagcgacgtggtgaccctcaccaaaaccgtgggaactgaagctggcgttcactgccatctacaattttgaaagagggagaaagatcagtaaccattttagaaacaaactattgaaaaaaataaagaaaacaaaagacaccttagcttttcgcaagtagtttttgaacatagtatccttagggtcgtcctaagcgtcgggtttcgccctagggccaagcctgtgctctaataccatctcttgtcacgccccgagctagtcccgactggaattagcccgtgacgctccaaattaacctgttaatcgataccagtcccaggaaacagtgctggtatcacaggaagatagaatatcacagcaacagaggtctctttattatagagtaggagtacagtcatgttgggctgcggacagatcccgagctcacaactgcattacaaaagggaaacggaagccgggacttggaccaaacaacacaggcgcgacttgggaactaggccgaaaccctaaaactcatcgtaaccggcttgctcctggaagaactcctcatcagcaggatccgcttcatcttcatcagcaactggggggaatatttatatagagcaagggtgagtacgggagtactcagcaagccaggggaaataagtgtttaatgcaggcttcaaggaaaggctgttgttttcgtaattgattttatttgaactcttttctaaaaacatctaggtgagtgcttctcaaacgacacggttgagacagtgcgtctcgtccggtcggagtatgtgcaatgtatcagtctttagaatttaaacaaggttggcacccggccaacagctttttcaacggccacccgggccaacaacttttcaaacggccacccgggcctagctgatcccatcagctgcagatttttcaaacaccgaaccccttttcacacagtaatttcacaagcagtagtcaaacaaaactacgctaggaatcacctcacatccgcccatgaccgtgggcacggctgttcgaacagtttgttaatctctgcagagggggtacactttacccacacgacattactaacccggatcacccagcccgtggggatcagccacgtcgggagacctccaagctttcatgacaaggcatttccaaagctgacacaggcttaccatatgccgacgagaggggttctagaccaacaacaggttaggtcccagaccatactgtgccaggaagcccaggggggtcctctccgacaccaccccggcgaatccacatgtctctcggcatcatggctcccctgataagctagttactcagccaggggtgtcccattccacccatgtggtcgtacttgtcttatgttcggatgaaattccaaggaatcggtccttaagtgcgggagcgggaaaaccgtacacccggtacgttccccggtccgcggttttagaaatttatttagttcgcaagcaccgacccaggtgtcgggttttccaaatcttttgtaaaacccaagttttacccaagttgtttttcagattttaagtttgaaggcgaccgtcgatactcgcacagagtgcacgaatatcgaggcgcaactgggtggttacaaggggacatggtataacaattaacaatggaaggatcaaatgcaacaagttaggtaggtccgccaatctgccctgcaggcgggacaaacagattaagtgtgatcctatcaatgcataatatttttcaaacaacataattaaatttcaaatataggctcaagatgttcaaaggtggcttgccttgctcgagatctggagcttgatcctcgaaatcctcgcactgcgggtcttcgggctccggaactacacgcgaaacgggacaactcaacaaacggcgaaaataaagccctattaatgacctctaagcgtgccattagatagatctcgagatttggggaattttggaagttgaacggagtcaacggatttacggttgggaagatattgaaattctaagattattgaatttttggcctaaaggaaaaggatttaattaaaccctttttggaaaagaaaaagaaaaggaaggagggaggaaatttagactttcctcgggcggctagggtgcggcccaagggatttggggcggctcggccgagcttaatgggccggccggcccaaaaggcggcccagagcgcgcgcgggaggggaggagagaggggaccggtggaccgggctcaccgcgcgcggtcccgggtgggacccgcttgtcagcggctcggctcaccgcgcggagggagcacgcggtgcacgcgcgcgggcggggaagggacgcggtgcatgcgcgcggtccgcggtggacgcaggtgcggcgggcccacgcgcagcctcacggctcgcggtggatcgcgcgcacgcggagggaccgaccggggtcggcccgacccggtctggctgagctggcgccgacgtggcgcctacgtggctgccacgtgggctggcgggaggtagacgacgatccggccgcgaaaggacggcgggcggcggcggcgagcggcggagcgaaccacggtgatacgggcaaagcgagcacaccgggcggttgttcgtgacgaggggagacgaaccaacggctcggattcgccggaggttgctcgacggcggcggattgcggcggcggcaaccggcggcgggagaaggggaaaacggtgacgaagctacgaggggtcgattcccggcggtgagagcatctacgcggcgtcgggaactcgacgctagcgtcggattggacggaactacgccgagcgaggccggcgacgagcgggtgctacggagctcgggcggcgacggcggcgagcacacggcgagcgacggcaacggtcggggcggcgccggctaactacggggagtctactcaagctactaccgaaagctagggggaggagatggagcgaggaggaagaacggagagaggcactaccgtgcgggacggggcgcagtgacgagaggccgacggcgcgggagtgatctctccggcctcgggccgaggaagaggaagaagggggcgcccccggagtccctttccgcgtccacgaacgcaccggctctcccggcgcttggcgatggacggcggaggcaaggcagagcacgggagcggcgacaacggtgaggaggcgaatgggagaggaaaggaagggagggggaagacgggtttaaaagggtggcaatgtcggtttgagagaggggaaccgacatgggcggtcaagccggcgagctggcgctccggctagcgtccaaagcggcgacaggaggtgacgctggcgagaggggaaaaaggggagaaaaagaggaaaaggagggagagaaaggggctcgcccctttgccgattcgggaaaaggaggagggagcggggcgactcggcagagggagaggggctctctgcctccgccccttggaggctagcgcgcggagtggcgggggccgggcgatgacgacggcgatgacggcggggcggtttggagcggcgcgacgacacgggcgacaggcgcgggctggcgcggcagagggtgacggcggcggcgaccgggcggtcggccactcggcacgcgcgcgcgggaaacaacgggcggcgcggctgggtagcgggaccgggcgacgcggacggcgcagacgacgcggctcgggcgggaaaccacgcgggcgcgcgcgcgagcgacggcgcgcggcgccggctttgcgagcggggagctcgcgcgagaggagggggcgctcggcgcggctctcgcacgcgcgagcagcgagcgggggggggggaaacgcgccggggaaagcgagagagagagagagagagggagggagggagcgctcggcgcggcggctcacgcgcacgcgcgcgcggcgtgcgggcgaggctgagcggggggggagagcgcgagagagagagagagagcgcccggggagagggggccgggggagagatgggccgagcggaaatcggcccatcgaacccggaggaggcaaactagacttttgcggagaaatttgatttggagggattggattcggaattgaactcgacgatagatcggggattgagatcttgagatggcacggacactagacagcaatcagagaaacaaatttcgcaattagggtttttaagagataatttttcccgctaggcgccacgacggaacgggcgctacaatactttagtataatttgcaagttttgaatttgacttgaagaatataaaaaaaattgagaaaaatcctataaacattgatcatggtaatcctatgaggcatcaaaatatgttttaaaagtagatttatgtgaattttggcacttcaacataatcaaatattttctaaaaagaaaaaggcaaaaagacaatagtatgttatatagagaaatatctggtgaaaaccaaggcactattcaccccccaaaagaagttgagtttgaaattaagatttggtggaaatgtatctcatgcctatacctatctggctatctccagtatttttttccatgaatttataaaattttaggttcggttgttcacgggttttcacttgtacgaggtttttactggatattcccccatgatatatgttgttatatcaaatatttttttactattatattcctgatgtcatagccattataatactacatccgtctcaaaaatatcttcatttttaaccatacgtactcaaataaagtgaaaaagatcaaagtgtccctcatcaatatgaaaagtagtattagtgggtatgtatataaagataggtaagtggtattgaaggaataagactcatcaatttgtggaccaagagtaggtaaagaaaaagaagtgaaattattttgggataaatgggagaggtgaaaaatgaacttattttggatggagtgagtattctgttgtcatattatattatattatattatattatattgcttcatgtttgttagacattataatattgtgttgatgatggcatggactttaaactttttcaaccattgtcataataattttaattctatacatatgttacataattgcataactatcaattgtgttgtttcaattggaggtgtccaaatcatagcaaaggtcaaaatgtttcaattgggggtgtccaaatcatagcaaaggtcaaaatgttttcttggtcgaaatccattcttcgttcactcaaaattggtcacaaggattcaaatattgatttatactattttgttgttatttttcgcgcatgccactcggtatttcacagattttattattttgcggagttttgcattccttgctttaaacggttttgtaaaccctgatttggtcagttcatctccatgttgtggaaacaatcattcctggattatagctctttggtttgctgggtgaaatcagccttcacaagtttggtttagaacaatccgaaattcctaaaagtcaaactttccaaatctctgtggctgtgtacagtctaaatattaaatgaatcacctaacaaagttgtacataattagaatcctagaatacatgacaaaataaagatcagccatcatacctgtactcagtaaagttccagttgtatatgaaaacgcataaaaatgctggcacttagcttgatccttaacactaggattaactgttaccgctaccaacctctttgttcttgaagccaatgatgatggctggctctttggcctgtgtgtcgtccatgaccagataggagtaggagatgtaggagtatcattcattgggccagctagtactttcagaggatcttcatcggggaaggttgaactggctgctgagagcaggtacaatagcagcctataagccaactgcaaacatattttaagaagataaatgaggaaagagaaaatcagcgggctacagatttgtagccagctgtagcacggactttaagaagaagtgtgtgtatgacaggtgggaccagatattaatagtgtaatatgtaactattatatgaataagctattagattggctatagatgaattagagctaatagttggctacgctattaaacttgctctgactgctgaagtgctgagcaccacccaaccccccctacgttggttacctacgaatgacggtttggggcaaacagcacatgcatatgtaggccctttgtagtttctacgtaaaaacttttcattgcgtgtaaattacgaaacaaatcttttaagcttaattgcttcttgatttaacaatatggtgctacagtaaatatttgctaatgataaattaattaggtttaataaatttgtctcatagtttatagatagaatatgttttgttattactttacgtttaatactttaaatgtatgtacgtatatcaatatgatacttttcaacccctcgaactaaacagtgcaatagtgcagcacgagtaataaaagagctttggtcttttccaacaaacgcctcacacatttttttgtcacggctgtttcgtgcgttcgccctcactgacatccatcccccgatcgacgacgacccgggggagacctgacctgacctgacccgaccctgaacctgaaccatcgggcgctgactcgtgggccccaccttccgttacttgccttgcaccggtgagcgcccgcgtacttccttcaccggcggggttcacccgacgtgtccatgacgggtgggccccacgatcccgacccccccccccccctcccttttcccgttctggtatgtcgaaaatgccttccccacctatgcgcgctcctccttcccgtgcatatcgtaaaacaaacaaaaacccatctccaacgcggagcagagtagaacaccgccccgaaaaacccacatcgctcgcgtcctcgcgcggtcgcgccccccgccgcttcgcctgccgccgccgatgagatgccccgccggaaggggaaggggaagggggtcgaggacgaggtcgaggtgtacgagccggcgtcccccccggagcgcgtgctcatcatcctcgacagcagcgaggacgatctcgacctgcaggaggtgcgccgctcgctgatgatcacgggccgggggcgcgcgcgggcggcggagcgcgtgggggaggaggctccgcggggttctgggcggcgcgcggcgccggtggttgctagccggcggagacggagacggtcgcggtcgcggtcgcggagcccccgcgccgcccgcccgcgcgcggagtcctcgcggcggcctacggcccgccgtgcccgtgcccgtgcacgtagcccctcgctagagatcatcgacgtcgacagcgggagcgacaggggcgtggtgcgcgtcaaggaggagccgcgttccggaagcgactcggactacaatggtgcgagaggtcgtgcgcgtgcgcgggcgcgggcgccggtcgccgccaccgccgcgaagaagaagaagaggaaacgaggaaaggaagctccaagcagagcccaggagagccgggaggttgtccgcgtcaaggaggagccgaattccgacggtaatggtgcgggaggtcgtgcgcgtgcgcgctcgccggtcgccgccgccgcgaagcagaggaagcgaggaggaagagaagccccaagcagagcccaggagagccgtgtgcccgttcaaatcaaggaggagccgtattccgggagcgattccgacggcaatgtggccggtggccgtgcggtcgtgccggccgccgacgcgaagcaggggaaacggggaaagaaaaccccaagcagaggcaaagggcggcgggtggttgttcgcgagacttccacacccgctgctccgtccaatggtgctccctccgtcggcaggggaaaaggtagagggcctgggagaggtcgccagagaagcaagggcgctgttcgtggtcgcgctactccggtgaaccgggtgagcacgggtgttggttcgagaactcggtcacgcttggcagagcaggggagagcttttgcacaagaggaagaagaacaagtggaggaacgagaggaggaggaggaagaagaagagcaggggagagcttttgcacaagtgaaggaagaacaagtggaggaacaagaggaggacgaagaagaaggtgaggaggagatggagatggaggtggaggtggaggttcgttcagatgacaacgatcatggcaatggtggaatcaggggagaaggtggaggtacggacgatgttgcggagatagaggaggaggaattgggtacggatgaagatgaaaccagtgatgatagcgatgagaacttcagcgatgaggaaggggatgaagaggaattggaggaggaggaggaggaggaggaggaagaagaagatgatgatgatgatgacgaggaggaggaggaaccgggtgatgcacctgatcaaccgggtgaggccggtgaggaatctcctccccgatcaagaatcatggcaatgccgctgatgggaaagaggatgtttgagggatttagttttctacaacaggtggacacctcgactggcagggatatcagagctcgcacacgatcaaatttcaaacgcaagaaactcctggacaagaaactgctcaagcgtgggacgttcgcgaagccttattgtatcgatgtgtctagctcggggtcggaggaggatgtgccacagccggagcagtcggcgtacggtggggattgtgcggatgacgatggcggcagcgatggcaatgaggagcatagagctgtgaagaggaggaaattgaacaggaggcaaagtgcccatagtgatagcgaggaggatacaacatttgtatgtgatgtcaaggaaggatcaggttctaggagggtacaagaaggagcacctcgtaggcaggttaagaaggagggttccaacaagaaaaaggatggctccactccacaatgcgtcagaaacaatggaccaaaagttgggagacaaacaaatgggctcaatggacagggtggtgtatccttcaagagaaatgtaaagattgctcagaggaggaagcgcaggcaagcaacggcagaccaagaaaagtatggtcatttgctcgaccccatgtttaatgaaatagagagcaaccaatatgagcctgttcctgaagagcaaattgacaggagattgcccctggtattcgcatttggggatgacgataagctggaagagaaatccaaacatgacaagttacaggatgaagatgaactgtggaaagaatttgattttgctttggaatccataaatgtttgttctcacaactgcgaggaggtacatcgtgctctctgctacgcaaatatagttagaattatacttattatctaaaatgataattctaattatgtcaatagaagtgcgctatcagccctgacttttgtgtttcttgaatggctttaatgtgaggtttattatttaatcaggaataatagctaggatggattctatatatatcttatataagccaagtaaatgtgtctaatgactagttttggattctgaaactattattgaaattaaatcagcctgctccaaacctgactattgatcattaatttatagaacaataaactgttttgtcttttgtgtatgaatagatatttatgtacataaaaattcaaaacaaagagtaattaagaaacaaaaggtttgtttgcataagaatatatatgtatggcgcagtcgcagtcccatttttcttgctttgtttccctttctaagtgcaactgcttacttgcaccattgtaaatattgctgccttttcttaatataacaccagcaattgcttgctcggtttcaaaaaaaaagaaaaaagaaagaatatatatttaaaaagaaagttagtcttgctgcctcacaagattattcatagctgtagtatcatttaatttgtagtaaaattttatatgcatataagtatgcaaaataaatgcatcatcaatagcccttgctaatacacgagttagcttaatgttctttgtggatatccatcagcctcaggaagtggttgtcagaataagtttgtaaagcctccctatagggaggtctgagttgccttgtttgtcctctcagcatgttaggacaaacattaacttttgtatgcattcaaatgtaaacctcttttggaaattctgtgtttttttatctccagtaaaaaaatctaaatacaaaagtgatgctcatatcgttgttttcagggtgaaaaggaagatgagcaagaaatccctgcggacaaagcagcttcatgcatccaagggaagcatgagctcattattgatgagcaaataggacttcgatgcaagcactgcaactttgttgatcttgaaatcagattcgtacttccctccatggtaagctactaccgtacactccaacatgtttcccaaagaccttatacttcacctgactgatgcttttgcctttcttctgattaatcatctattatcttgcaaaaaattatatatgttttcttttttttctcattcaataggtaaagtcctgtactgaaagggacatgagaaaagatcacgagttagacttgttttttgatgatatcctaacatcagcgggatatgaaggaccacgtgattttggtggtaaaaagactggcctggtttgggatctagttcctggggtccgggaggacatgttcccgcaccagcaagaaggttttgagttcatgtggagaaaactagcaggggggacttcaattgaacagctgaggaacaatgcaaacactattgaaggtggctgtgtgatttctcatgcaccagggacagggaagaccagactagcaatcacatttgttcaatcctactttgcgttttttcccgagtgctgtccagtgataattgctcccagagggatgcttgctacatgggaacaggagttcagaaaatggaaggtgaaggtcccttttcatgtattgaactccaaggagattaactggaaagaagacaggaccatcaaacagctggctatcatggatgaaaatttggcccaaagtttggctagaaacaaattggatcacaaatttaggcgaaagttgaagttggcatcatggcgtaaagggagcagtataattggtgtgagctatacgcttttcaggaaactagcgaaccagagcagcatggatgggaacatggtgaggaatctgctccttgagatgcccgacttgttggtccttgatgaagggcacacaccaaggaacaagaaaagtctcatatggaaggttcttgaagaagttcgcaccaaaaagcgaataattctatctggtactccatttcagaatagctttcttgagctctctaatgtcctgtacctgattagaccaaagtttgcaagacacttcgcttctaaaagtttcaagaaaataggccttgaggattactggacatccttgacactgaataacataacagagaaaaagatagatgaaatccggcaaatactcgatccaattgtgcacatccataacggtgacattcttcaaaagtctcttccaggattgagagaatcagttgtgattctgaatcctcttcctcatcaaaaggaaatcatcacagcaatggagaacacagtgacaatggggactcttgatgcagaatacaagatctcccttgcatctatacacccgttcctcgtcacatgtgcaaaactgtcggaaaaagaaacatcttctgtggatgtctctttgctgaagagcttacggccaaacccgtgcgtaggagtcaaaacaaaatttgttttggaaattgtccgtttgtgtgaagccatgaaagagcgagtacttgttttcagtcaatatcttgaaccactatctctgatcatggaccaacttagtaaaatgttcaattggatagaaggtgaggagatcctactgatgagtggaaatgtccttgttcaaaatcgagaagctttgatggaggccttcaatgacatgaaaagcaatgccaaggtaatgcttgcatcaacgaaggcatgctgtgaaggcattacacttatcggggcatcacgtgtggttctccttgatgttgtatggaacccttcagttggaaggcaggcgattggccgagcttatagaattggtcaagagaagattgtgtatacatacaatctaatcacagaagggacaaaggagaaggacaaatatgataggcaagctaagaaggatcatatgtccaaactgctattttcaaaagaaccccatgctgcaggattcaacttgtctcaagaagtgatattcaatgacaagatattggaagcaatgacatcacatagggagctcaaagacatgtttgtgaagattctccattctcactaacagtaaacttacagctaaatctggtaatttgattcttatgagactaaaatgcaatttgattcttttgagattaaaatgtcagtttgattcatctaagactaaactttgttgtccttttttatgttgtttgcggaaaagtaggcatgcggactcaagtttcatccatatctgatttttttggcttctcaagaagaaaatcacctgaatttttggaggatggtaagctcaggaatgttgatgtgaataaattattcactgtcaggctatgcgactgatattgaagtgttgattgctcaaatgttgaaactgggattaattgctaccatgttttgtggtgatctaggcaccgttagaactgtagcgatggaagcatgaagatgtgccttattttttatgtccctatgtcctgaccgaagattctcggttcatacttcatactatgtacgatcttgtaactgagccttacggtttttgtagggaggttgcatatccttggtaagtatatggaaaggcacatcggtatataagttactagttgatcagcatctatatcctaactggaaattacgtatacaagttacttatgtgttttcttaatttagggaatgcagcgctgcttcttatctgtggagaggaaaatgtgtctgcaccgccatactgtgctgcctggaattttgctcagctatagatgctcaaaggactgaatagaaattgtagaaaaacctgcaaggcctgagaataggggaattttttttaattgcttagagttccagggcttccttgagttcctaggccagatgcacgaatggatgaccctgaagctcgtatactgaaccatgagatgatctgttcttgagctgcacaatggcacaatggatggttgacatttggttgtactgcttttacaaatacccagttggcgattgttttgtctgcttcttctacattctggttgcagtactagtcctcatttgactaactagctctgtgctttgcgaaatccattgacgtttcagtgtcctgggtatttgggagatcgcgtctcaggctagttgcagccagggtttcccaaaccgccagtgccggggttaccacgccccggcggtaagcacggttaccgcgcggtaaccgcggtaaccgcgaaaaaccgtgcaaaatttatcaaaaaatcaaattatttttaaaatttatttgaatataaggaggttaccgtggtatttatattaccgtaccccgcggtaagcccggtaaccgcgcggttaccggcggtaaggtaaacgctggttgcagctaccaccgttcaaccatgcaatcacacgttggtgagcttcacgttttagcttgtgtttgcacggtgcaaagcctggaaattttgtgacaactgagaactgagagaacagacgttcaaaggtccatgctttcaaaacgcttcttttttcaaccgagacgccggtccaagacctctaagctctgcgctgagcaaaaaacactttggctacttgattaaaaacgtgtccgaaaacagtttagtgccttctcgatatcgtgcagaactgcagatccaattggaaatccccgggacttgttacgtgctttgtgcctccacagatgtcctgcttgtgtaacgtcgagaattcttgactcgtactagtatatgactcgagcagttcgatccaccagccaactgaactgaagaaaataatgcagaaagatagcatcaaaacaccctttcttcttcgacaaactctctactttcaacgattcccttgcagaataactttcttgatgaataattctattaggctctaaccagcggtgcaatgccgtgtcaccgagcctaatagagttcctgtttgtattctcgaaagagttcctgtttgttcccggcacgctttcaaagtcactcagctattaatgccttcggattccagagatgaaaatcacgcctttggttcgccaaatttccgtctcgtgagcttctcgtcgttcttgtgcttgttttccgtcgaatcctcgtgcaattctgtgagaaaaagagggcgatctccggtgctgccatgaacgcgctagccgccaccagccgcaacttccggcaggcggcgaggctactcggcctcgactccaaactccagaagagccttctgatccctctccgcgagatcaaggtacccgattccctgcttgcattgcatagattgattgatagatgctctgtgtgatttgtgtgatttcctgcttctctgtttctcgcaatttgatgcttgattcagtggttcacatcggcttcactgaaccattggcatttgtgtgttcaggttgaatgcaccatccccaaagacgatggcaccttggcgacgtttgttgggttcagagtgcagcatgacaattcccgtggcccgatgaaaggcggcatcaggtatcaccctgaggtgaggagatgatgtttttctgccaattcctttagaaactacaaaatttcttgcgttccaaaagagtaggtctttagaaggatcgattagtattgtaaccatcaaggtttctccctggacaggttgacccagatgaagtgaatgcacttgctcagctgatgacatggaagactgctgttgctgctgtgccttatggtggagcaaagggaggcattgggtgcactcctggtgaactgagtagaagtgaacttgagcgtttaacgcgcgtgtttacccagaaaattcatgacctcattgggatcaatacagatgttccagcccctgacatgggaacaaatgcacaggtgagtcatccaattccatctgccttataatttatcatctgctgtcttcatactctgcttcttctttacatgtttctgaaaattttattttcaactgtcacagaccatggcatggatactagatgaatactcaaagttccatggccactccccagctgttgtcacgggaaagccaattgtgagtttacatgagtcatgaaaaacctatttcatctagacaaactcttcatattttatcattaactttacttattgtcttatttgatataggatcttggaggatccttaggaagagatgctgcgactggccgcggtgttatgtatgctactgaggctttattgactgaatacagcgagtcaatttcaggatcaacctttgttatccaggtaacaatgacaacattattgattgacttaacaatatgttaatattaggatgccaaaaattgtataactttgtacttgatcaactactaatcttttctgcagggtttggggaatgttggttcttgggcagccaagctcatccatcagaaaggtggcaagatagttgcagttggagatgtaacaggtgcaatcagaaataaatccgggatagacatacctgctctcttgaagcacaggagcgagggtggatctttggaggacttctacggtgcagaagttatggacgctgcagagctgcttgtgcatgaatgtgatgttctcgtcccgtgcgccttgggtggtgttctcaacaggtaagaacggcgcattgctgcatttgataaaagaatctcgtattatggtaatttgattgatgtttttgctacattttcacctggtttccaatatctcattattaggccgtagtgtttccaaagaaatatgtagtacaaatttcatatgtagcgcaaacctaaaaactaacgtaggatccaattaaaaataaaccgtctaagatatcctgagtaaagcatttactcccaataaaactttttacttattattaaatctgagagtaaaagttttactcggggtgatgaggacaaatcttagacgtcagtttttttttatcctatggtagtttctaggtttgtaaactgcaaatgagatttgctttatattttcctgtgtttccattcatataaatattggcaccttggtatttggtagtgtgtgcggtgtcatgataccaaaaattgttagctgtgtattgtggagttttctgttttagttttctaccttagtctagctgcatgttgcagaattgctaattcacatgagttatctgcagagaaaatgcagctgaagtgaaggccagattcataattgagggggctaatcatcccactgatacagaagctgatgaggtaagctcaaaaccacaatgagctctctctctctctctctctctctctccttcaaggaacatgaatatcctcaagacatcaagaatgataatttatttataattctaatcttttgagcttactctctgccttgaagatactcgcaaagaagggagtcattgtgctgccagatatctatgcaaattcaggcggcgtggtcgtcagctattttgagtgggttcaggtaatagaacagaagattttgtgccttctttggatctttcccatgaatctaatggcatatgtttgtgctacgcctatggtgcagaacattcagggcttcatgtgggatgaagagaaggtgaacagggagctccaaaagtacatgaagaacgcttttcagaacatcaaggacatgtgcaaatcccaaaactgcaaccttaggatgggggcattcactttgggggttaaccgggttgcaaaggctactctgttgaggggatgggaggcatgagaatctgttgaggaatcacctcaattttgtaattcaaaatcttcattcggtaatatattggcacaatctggtacagtgttggttgtcactagattttacaaggaattctaactaaaggcaccttttagagcaagtttaatagtatagcccactactagctacaattcatctatagccaatctaatagccaattcatacaatagttgcttactatacactattaatatatggccccacctgtcatacgcacattgcatcttggagtccgtgctgcagctggctacaaatctgtagctcgctgctcttctctctcatctttcatctccaattcatctagagcaggtacaatagcaggctattaaccagctataaacatattttaatgagataaaagatgagagaggagcagcgggctacagatttgtagccagctatagcacggactccaaaatgcaatgtgtgtatgacaggtgggaccatatattaatagtatatagtaagcaactattgtatgaactggctattagattggctatagatgaattggagctagtagtgggctatactattaaagttgctcttagagagacttcctttttgttctagattttgttttacctcatgcagtcatttaatcattgtgaatttgtgatcattttggccatcattcctttcttggaatggaaagcctgcacactatcttgctgtacatcaaaagatatacaaccattgatcagaagcatgctggcaagaagttttaactctcaaccaaatgaataatattgtagtttttccaagttacttccactctgttttcatgctcatttgtatatctctgttgcaaccccagaactcaacggtcaagtgcacaagaaatttatctctcagtctgcaagtttacagatatcatacaccttcttgcctattttacacactacatgactaaacttgcatctcagattagatatttgagatgtgcccagactgctctgagatttttcgatctccttaattgcttgtttcagtttgcagctaacatcacccaatgcccacgccagtgatatatgtggccgtggattctgccataagttcaagacactagttaaataattttgcacaaatgtggtgatgctacagatgataatgaattagtgatactctgggtgggacactataatcattctaatcagccagtgactgattctgtcagacagatgttccaaaccaaacaaaattatagtacactaccgccctccccttatattgcagcagtgtattagatttctgttttaggttgcaattatgttgctcgcatgttttgaaattaaaccataaaatatgtgtgatgtggtacccatcaagtaaaatatgcagaacaccagcacaaacattgctaaagaatatattaccttatagaattcaggaagcccatgtaatcgatatacatcatctaccatcgttatctgtttactaatctgcaaaagtttaacaaacagtaagttaatagtgcatttcattaatgacatataagaacatatattatatggtatttttattatcagacttagtaaaaagatccatacaatgcctaaagatgctaggacactaggtagatagtattaagcacctctggcaacccagtacttgtaacttctagcgaaagaaatgaccgtgtacaatcatcattgacaaaatgctcccatttgttgaagtccatccaatacctgattaatatatagtcaattctatcagtgcaaaaaattattatacccaaataggtacataaagcaagtataatctgtagacaagtacacatagtctgtccactgaaaggagttaaatagtaagaactcagcaataaaggtataagagatgactaaccgttgctgtgagcggaacttttgccgaagcattgcgacaagggactcaatttgatgcacctgaattgcaacagttcttcctaaacttacatgaaactccctgctcagaagcactttctcaagcttttgttcatccttgcacaactcggaaagtgcataatctgcatcgatggcatagagatccggcacaaaagacgcggctcttctcataacaaggaccaggtgtttctttgcatcagaaggtatgacaactgcacgagagagatctatatgtaagagcaagggcctttcaggacgtaaaattttacatgtccaacagtgagaaagtgaatccttctacccgttttctgttcaattcaatacaataaaaaaagaaaccatgatactgaactgaatcaacggcattcccccttacactatataaatgacagaataagggaaaatgatgttactaaaattttgctatgttactaattctacaacttaggatgatgaacatgctgaaaaatcagttcagcaacagcaacatatagaaagtgcccttcgtcgcttaatgttggcaaggtgcatgcttatttcggtatatcagtatatgtactgtgcaaacatgcagtaatgtcctcagaatgcatcctgtttcctaaggaaaacccatgaaaccagataggtagggctaggcaatagatcctactcctacacatctgatcgtggtgttaagcaatataagcatgcctattcacatggaaaagcaactaaccttgcggtaacatgcaaccagcgataaacgaccaataatttacattcacctaagcacaaacagatatagaaagatcaagagaaaagaaagagagaaaacagaccagggatgtaaacatgtagcgcatagttgccttccacatgtgggaagctccggacgcgactcccctgcgccattgtcgagcaatctgcaaaacttcagtaagaacacatcaccggggggcctcagaataagaattgaggaaaggctcagtacggtaaagaagtatcaatcatgcctacgaagtttgggggctggaggaggtcgaggggcgggggagggagcaacgcggaaggttccggaggcaccggggcggcttcgcccgcggtagccgccggagcatcgccgtcggagtcggagtcggacgcgtagttcgccacgagcgcatccatcgcctcaccactatctcaaccggatcgagtcagaggccagaaggggccaatcggatccaccgctggccccgcctccggccgtcggaactcagttacccactcttccctcttagtatggcgccggcgggcggcggccggcggcgcagggtggccgggggcggcgaggaggcgcgctgcgctggtgcgaaaggctgcgggagcctggaggaagaagatgagtgggcatggatacttggcgttggtgggctggttcttattggatacggaaaaagtacaccaaaggtccctgaacttgttatcgggatagaaaaacgtccccgaaccacaaaactagatatgcgtcccttaactatacaaaaccgatcacccgagatcttttattggttttgacttcggttttggtatacggctgagtcagcatgagatccacgtgagccccacatgtcaacttgccgcgtcaacttcccctttcccctcttctctttctctgtttctctgcttcctccctccctctcgctctctgctctcgcagggcatcgggatgccggcgctagggcgcgtgcggccggggtcgtcggcggggaacgggttggcatcgttgtcgttgtcgaggaggctgaggaggtcgtcggccgtggagaagaggagggagcaggaacggcggcgggcgcgggagtagcagccgcggtgcggtgaggtggcgggcgggatggcggagaagccgcatccgccgccggcgacccctccttcgttctcgacacatccaccgcccccgacaacccctcctcccaaatcgcctatggcctcacggtacgcaacaccatggcggagccagagaaggcgatgggttccccggccgcgaaggagctggagaagacgccgcctcctcctgcaactgatggccccagcggtgacattatgcagcggcagtataagaaggacgccgacgccacccatggcacacttgttggcgacgacgcggacgaggcgcgccgcctcttcctcgcggacgtggtggagcgactagacgcggtgtgcgctgaagagctcgagcatgcagatccttcggagcagagattgggaagactggactctgctcgcggttgccaatggcgtcaccgcccgccgacgccaccaccccagtgatgagcagctcagtgaacgacggggcctgagcggaggagaacccaagcactagttgaccctggctgacagtattgtcatgggtagattaaagaggcccagttgaacttgcacgcgatgatttgtctcagttcttcaagtatcggttaatttgttcttgttatctggctctagcatgctattatcatgcaaatggaatgtttgacacaggtagctgggagctagaaatgcatgcagtcacaaggtcagattgatcgatgcagagaacatgggaagtgtaggcgagatcgattgcgagtaacgagccgtgggcggcgcagttcatgggcgtcgtgggggagcttgcctgcggcatcgacaccatcaaggtggagtcggtgtggcatcgcgtccccaccaatccggcgtcctcgcggatcccgccgtccctgctagttccggctgatggtgctgctgctgctccttactgtttgcctgcaggtcaagaggctcgaagcgaggatccgcgaggtgtgcgccgccgctcagccccgctcgccgcctggccgtctgctccctacccgtcggcccagcctgcgagagagagagagagcagagaggggaggaagggagagagaagaggggaaaggggaagttgacgtggcacgctgacatgtggggcccatgttgactcagctgccacgtagacaaaaaccggggtaaaaaccaccaaaaagacctcgggcgaccggtttcgtacagttcaggaacctgtatatctgattttgcggttcgaggacattttttaatgccgatgacaagttcagggaccttcggtgtactttttcctattggatactcgactgttgcctcgacggcccaactagaagttaacgaagaactcccatgattagtcttcttggcttatcagccgctactgcaatttgaattttgaaatttaaagctgattttaaagtttttctatcatagcttatttttcatcattggcttttaaatcatagtttatttttcatcgttagatcgctgaagaaatattcccagtttgatcatcactaaacaaacagcatacaagtgaacaacgcaacattcatcattcttaaattaatactcgcgatcaaagtgctacgtcgcttcatgtcccgtgaaatacatcaaattttaaatattgcacggaattgcaccaatataaattaattttaattggttacatgcatcgtattcaataatattcatttatttactctttgcacaaataaataagaaggcacttgcaccaaataaacagacactgatcattttgaaaagacaaaaaatcttaggtgatgctcaaacgggatgaaaagagcatataaaagttttacccatattttttaagtagcggcttataatcttgttttctccggtcgcgcataaactgtaactacatttagagcatcatgggcagctaggctaaatcataaaaaatgtgcaccaagccaacacattcgaaggtctacaaaagaccattgaaaagcaagcaaaacgcagataaataattcgtggaattgaactgttagtgttgggtgccataaacatactatacagatacagtgatacagctttgacaacatacacctctgaattgtccactgttcaattcaagcgattcgctccgcacatcactaagatgtgaagtgttgccctattcgtaagcctggaaccccaggcgcgcctgtcaatactattatctacaaacagtttatatagtggtacaagaatttctgaactatgacgtgcattttaatcaaacggatcaattcgagggtcgtgctcacttgccattgccatccccgtgcagagacatgttggacacatcacctgcaaacattttgtttgaaatcagggctgtttttcaatccaaaatagcaagtggaaatatgcgtatattatttgaatgacattgttgttgggaatcattgtgcaaaaggctgatttacctttcctgcgcctgaacaatttgggcacctctctgttcttggcgtagataaaggctgatcaccatcgctgaatgttgaaaccggttcagtaagcaccagagttccggtacttgaacagcgagcacaggccaggtatcctacaagccacaactgtcagtaccctagcaaagctgtagtttaaacaattaaacctatagcaattgagcaactataagaaaattttcttagaggggatagattttttggtaacaggtccataaaaacaagcttaataactaggcactaacaaattagacgcattatacagcattacaagctatcagacctttgaattcattctgagattttttgattcttgtgagcatctttggactgagctaacactagtatagcattcttacattgaagtactaaactttttctttacataatggagagattttactaaagcacaaattgtactgcattgaagtactgaactgcgctgccaaaagtccaaaacacaacagcaagtgcaaatcttagatatttattcatattttatgggtacgaggattgaagcagcattggaagaaataagtaccagttcctaaacaatatttgcaccgcttatgctcctgctgtttgacattgttgatctcaacaaccattagagcggagataactccaactgctccacctgagaacgatgccacaataggatctacctgactgtacagatagaaaaatcatgaaaaggatcagcacacggtatctcagaacttccctggtatcaagaactggttaaaagatgttcactacaccaatagaacatggaatagttgtaatacctcagttgcatcggcaaatggacactgcggatgaagtctgcataagatgttcctcccacaccgagtttaagttccagctgcaagaaaagtacaataaattgttaaacatccactggatattgatggaatcaataatgataaaaatggtgacaaggactagacagtgtaacttacaattggtgcaagaaatccaccgaaaaccattatcccagcaatcaaagtgaaacacgtagcatagtagattttgagattagctgcactctgtttaaagcaagagaaccattagtaatgagctgatttggaacttcaaattcaacaagtaatatcaatagcatatatacactccttaaatatgaaccatgtgagatggtgctggatgtagaagtatatatacttaccaggggaggcaagaatggaatgaatgatggaaaatcaggaagttccccttcaggcacatcaactgagatcccaagttcaacattctttattctttgttgtattctcaacctgcgaatctacgtacacgaaaatagaaaaataaggatacagcacaaaacacatctgacactgcacagaagaactttagaaggtataacaaactgaaagcaatctaaagtacatgcagaaagaagatgtgccagatttattcaaaaggattaacgggtgtttccagttctctgatgatttgcaacacacctgtttaatatcacaatatctagaataaagattaactaacaacggcgcaagctgtgaaatcattgcgtaaacaatctaaaagtactatgtaatagctcagaggattgccatctccacgttagttgaactcatatgctgattaccaagcaaggactacacattatcttctgtattttaactatttgtgagggataatcagatcataccaagcttacactattgccatttaatgaaaaacagtaacatagaaaaaacaaagtcgacatacctcctccatatgcaagaagatcttgttccggcggctcctaatattatcctgaatctcctgcaagtccagcttttcaaaatcctggactgtctcaggcccttcaatgatacaaaacctgagaacaagccgggcatgactcaacatgagctccgtgcaatacaacaccaaaccaaaatgttatcatctctaaaggtccaaaacgacagagttcgggaccaacgttttgtcagctagatccacctaacgtgttcagtcgtactccagcaccaacacggaaggagccaagcaaaggctacaaaaactacttgaatttttatcgtctagatccggcatgttcagacatcctccatcaacagcgaagctgaggcaagcatatcatatatatatatagctaccctggtactcggttttttatcagcaagatccaccatattcagacaaactctatcaacagagaattcgtcccaaccatgaagcatatgctaaatctattcgaattatttctcccctcaatcccctgtatgctggtcaacacagtactgagcgtatattggggggtcaagctcaagaacactcagccatccagcgtgattgacccacgaccaaccccccaaaaaaaaacacctactgatcgtagaaaaagcatttaccccggggagccggcggcctgctcatcaccagagccgaacgacgctgctgcaggcgtcggaggcggcgaggacgacgacgacgacgacggcaggtcgggggatccgcccgacgcggcggcggaggacgcgacccgccacctgcgcgccggcagcggcggccgcagccggtcagcgtaggcccccggccgcggcgacggccggagccgccccccggggccgccgaggccgctgcaggccagcatgcgggccgagcagagcatcgcctgcgccctgcggatatgcacgcgcgcgcggggagctgatggtgacggaggaaggatggataaaatatagatggataggttggataaaatcggagctgagcaaggaaggaagggaggaagtggtggctgcctgagttcctccgatcggtggagcggggaggagcagcgtggcggcagcaagacagcaagtagtggagctgatgttttctaggagtactagtttttttttcttttcaagaaattgctgatgggcacagaggaaaaatatccgatactagtggatttctgatgccgcgcggtgcgctgcacagggacacgtacgcgcctaccaccggcaggcggcgcgccactagggtctgtttggatgcatgtctgtttcactttgctaccattttcaaccttatattttttaaaatattaaaaaaaatagctacatttagtttgttgctaaattttagtaagtacatatgaaatcttaccaaattttgtcaaccttgccaaaattttagcaatcttaacaaaaatttggcaatgccaaaacttcgtaaggttgaaaatggtagcaaagtgaacaagcccttagttgccatcaaatcatatgtttagacactaattaaaaatattaaacgtagtatattgataaaatccattccataactccgaactaatttgcgagacgaatctattgagcctaattaatccataattagcctatgtgatgctatagtaaacatgtgctaattatggattaattaggcttaaaaaaattgtctcgtgaattagctctcatttatgccattagttttattattatactatgtttaatatttctaattagtgttaaatatctgatgtgacatggacttagtcgctgatccaaacaccaccgaaacatacgcattgaccacctaagaatggagttaatgtgggtggtgtgcaaaacttacagatactaggtgaaaccccccgtgttgctgcatgagtttagtatgataataataaaataatatataagatagctaaacaatataaacttacataaacactagaatcagttgatgtgatatggcttaattaaagaagagagaaataacataaaccaagtgataagatattataaaggtatataagatattataaaaaataatgaagatatatattgaaatattattaggaaaaagtacgaattaccccaaactattacggtcgtccgaattacccccctgaaccacaaaaccagacattcttcaccccccaactatgtaaaccggacgaattacacccctcgacccaatccacggtagttttggtctacgtgacgtacgcgtggcaacccagtcagcattctatttattaaaaaatgtgggacccacctgtcatatcctcttccactattcccccatctcactctctttgacgcgcacggcagcaggctctctcttctctctctgacgcgcacgcacgcggacgggggccagaggcggcggcgaggacggcggcacgcaccggccgcaggctcgaggcctcgacctccgtccgccggtggccccgtgagcagcaccgactcaggcgtcggctgcggcgcatccgcggggtagatggtcgagctagcgaggacaagcagattgcgtgcggagccgcagcggcgggcggcgtccacgacgttgacagtgatgcggaggttctccgttaggtactccgctggtgcagcggagccggcgtggacgccgccgatgttcgccgccgccaggatcacgtagcgcggcagctcggcggcgaagaagacacgccaggtcgagctcggcacgagtccggaccacgatgttggtgaaccccagcgagtccagcttgcggtgcaccaccgagccgaccatgatgcggtggccggcgatgaagaccttcgctgacttgtcgacgaggaaggacacggcggcggcggcatcgccggtggtggctcgtcgatcccgcatgcaggagctcgagcttgctcggcagctcatcgatcccgtggaggaactcgaggagggacagtcgcaatcaccgccgtcgtgcctcttcgcaccccgtgccaccgcgtgccgtcgcgtcgcgtttgtcacaccctaaagttctttcccaagcctaaattgaatttataaatcacctagagaaaatatcggtgtaaaagcaagagagaaaccctaataaattaatgcaaataataatcggaattggcatgtggaatttttcttgagttctacatatcgaaatatgctaacaagatttttagtgcaattttcagagctctagaactaattgcaaccaattaaaaatgagcacaagcaatatttaatcccaggaaaatccatttccttctttttctttttctttttcccctttttcttttccgaatgggccgccggcccattctcttcctcctccccctccccgctgggccggccgcccgagccccctcctctctcccggggtcgccgataagtggggcccacctgtcgggtcctcccccaacctccagctgccgccgcgcatcccgcaaccgtcgccgcctccttgcgcccgcgcctctcgggccacgttgcccacgtcgccgcccgcgcccactttccccgcgaccccgcgcccactccctctctctctcccgcccgcgcccgcgcccgcgccgaaacggccgggattcaattttgaatcccatcggccacgccctctctccccctccccactactccggtgaaatcgggctgctcccggccacgtccgagccccctctcccctatttaagcatccccgctctccccctctctctttttctccatttcgccgagctctctcgtgccctctatcgccctagcgccgtcgccctcctcttcaccgccgccgccgccgccgctctggtagccgctagccgccacgccgagccgcgccgttgccgtcgtcgagttcacaagcccgagggccacgccgtccgcctctccgccgctgttttccgccgcgggaaccccgttcgcaccgcgcgccggtgagcttcgccatggccggcgccttcggtcggcgccctaaccatccatggtttccctctccctctctaactccccccttttgattccttaggtgatcctggagctcgtcccgccgtcgccatcgccctccgtcgctcgccgtcgtcaatcgtcgtcggtgaggcccctccttctctttctctctctctctcgccgcttagccgctgcgccgccgcctagccgctcagccgccgctagcgccgccctccgccgccggctggtcgccgccggtcgccgccttgcgccgccgtgcgccatggccgccgggccggcttgagccgcccgtgcatgccggccacgtgctcccgccgccgtagattggggccgtccaaccccaccgcccgcgtggctaccacgtggccgccacgtgtgcgccgcgtcggcgccacgtgtgcaccacgtggtgcgccgctccttccccggttcgtggacccggtccaccgtggaccgcccccctgagtcactccgtgtggggcccgcatgtcggcgctgccctctctctctccccgggattttaattattgcgtaataaatcaattaaggatttttctgtttatagtaaaacacagtgaatcttctaaaattcatatctaattcatctgagctccgtttaagcccattcaagtctcagaaaatcaagaaaaatgcatagaatccattaaaaatggttttgttttctgtttcagtagtcttatagcctgtttgtattgtttgctttgtatgtcgcttagattccggctctcccgacgctctggtgtactttgaaatagtcgccgaggttcctccagcagcagagcaaggtaagtcatgcttgtcacttgaacatgttaatcctatattgcaaatgctctactattttcccttaaatactgcattgttttataatgttactacgggatgtttacctactgttacagccatgctattttgtaccatgctcctttgttagcttgggatataacatgactagagattggactagggattgcttagccttgcttagttcaactagcacacaatgggggaaatcacattaatgcttagacttcaggttctagtgttggtggtggagtaaagccaccgtcttggtgttagtcaattaaaatatactaattgctgggctgtgggtgcatggttttgatggtcgcgcccatggcacttaaggaccggtttgtgggaaaccctggaagaattcctcgtacttgccacaagccagcgtgggcaacggctgggcttgtagtgtagctttcctctagctgacgcatccaggcaagggtgggcgtgatggagtttggatgggccctacgacggcctatgcggcttccggattcacctaggcacgaaaggggactgcccgctgccttgcgaggagtgggggtgaaacctgaggtgtggtgtgcttggttagagggggtaatgcgaagggtcctgtcacggcctctatccggtatgtcgtggtggcatgtcggcgcacgagaacgcgtcgtggggctgtgtcttgtgggtacaattgtacacatctgatcagagtaaaactattcgaatagctatgcccgcggttatgggcggtcaaccagattcactgtgattagtctcaccctagtctagtctaatggaattgattagttcaggtggatggttgggcctgttgcaacatggtgtagcgttggacagtggatggataatattgggtaattaatacaatttttatactgctttcaactactgtttataaatgctcactttatgcaaaagaacctctctagctatccattggtaataccctgcatcatacccctattccggtatgacttgctgagtacggtggttgtactcaggcttgctctattttccccaaaacaccagagtttgagtacgtgtcagatggcggtttctccgaggagtaggctccgttcgtgccgtcgaggatgcctgtggagtggtgttcccgttgcggtccaagtcaagggttagctccagttatcttttaattttccgctgcatttatgtaagacttttataatgtttgtaagacgtggatctatatgtcaactttgtcgtttgtgtaccccggcctgtcctggacgggggttttaatgcacattctgcttggaattctattcgggaatttctgggcgtgacacctatcgtcgtcgctcgtgccacgcgctgtcgcttcgcctgtcatcatcgctcgcgccgcgcgccgtcgttatctcccctcgagccccgcccacgccgcgcgccatcgttcgtcgcccatcgccgtcgtcacctggagccccgtccgcacgctgtcactctgcgcccgcgtgcctgtgtgtcgccgccgtcgcgtcgcctcctcgcgccctgccccgttgtgctgtgcatgccgcggtcctcgctgccgtgtgcgtcttggccacgaagccgtcctcgccgccacctccggcacccgttcgcgtacgtgctcgccgccgccgccgcccccgcctgctaccgtgcgcgagagagaggggaagagtgagacagagagagagaagagaggggaagagacagagaaaggatgaagcatctaggcccccggtgttaattttggtaattaatgacaagcactaattgtggactaaccgttgtgtttgagctatttatttgagttaggttcacttatttgtgtgcacatggatgatcattgatggattaaaattgacggcgcaaagcaaaaggaagagaagacggtaaactagtgttttcattttaaattgatcgaggcgttgggcgatcaaaattgtgctagtttatttaaagccttgccgtactattaagtggggtaatgacctagcaaagagatgattttaattgccacattaggtcattatgcatttagacttgtgctctcatttcatcacacacacacaaacatttttctctgtttgagttcagcctgacaaggaccagtctgaccgtggacctagtgccggtctaaccggccagggcagccggtctgaccgcagagtcagagctggtctgaccgccgcctcaaggctggtctgaccggcaggtgcgggccagtctgaccggccggccatatggcgatggtgccgtctcggtgtgccgatctcgagccgctggagccgtattcggtcagaccgagctgatggcggtctaaccgagccgaggccggtctgaccggccagggcagtagggcctagtgtcagccctgcaacggctagaaaactaaccgttgcacagtagcacggtctgaccggccacatacctccggtcagatcggcagagcactgagttgggggattccgcccccaacgtctagttttggttgatgggagtataaatactccccctccagcagcaaggggactttcttggcacccaattcaattgcataatcccttgcatctctctcacacacctttgagcttagtgttcatccattgtagtggttgaggttgttttagccaagagtcaagtgcatttgcttccattgtagagctagtgtggcacttgatcatctccacgccgggtcattgcttgttactcttggaggttgccgcctcctagacggcttgtggaggagttgcctagtgacctctccgagaagattgtggaggaggcccggtgccggtttgtgagtggtttggagttcactaccttcggagtgaaggaagaactaccccgagtgatcgaggcttgggtagtcctctccatgggccggctcccgccttgcccaccccttgacgaagggggcgtgcggtggcttcgtggttgagcggtagagttgggctcgcctcaacagggagtaggaaaccggcgtgtttccgaacctcggtgaaaaatctcttatctcattgtctcatttgattgtcgcatttacatttgtgcaatttacatttctagagacatacttgagatcatatcaccctaggattgctaaacattgacatatgagtgtgatttactttcctagtgatatacttgagccactttcaccctaggattgcaaaacataacttagttgcttagttagtcttgtccctcaccgagcctagcaacttagtttagttttgattaggtgtcatttaattttaaattgcctattcaccccccctccagtcgacatctcgatcctacagaggggaagagtggaaaaggatataacaggtgagtcccacatttttttataaatagaatgctgactggactgccacgcgtacgccacgtagatcaaaaccaccacggattggatcgaggggggtaattcgtccggtttgcatagttgggggtgaagaatgtccggttttgtggtttaggggggtaatgcggacgaccgcgatagttcggggggggggggtaattcgtactttttccgaaatattatgtaaattatgtggaatgatgatttaacatgctttcattttaaaagctctaaaatgtaataaattttaaattatagataatatagcatgtttgtatgatactaaatgcattgattgttagtggatgatgatgtgtcaacttgttagtggatgatgatgtggcatatttgtattttaagctttaggagttagtgggttataactttaaagtaagataggatatgggtctgtttggactttggatgtccaccttaaatccttaatttgccacaattttatgtcaaaaggtgtggctcaaaaattgatgatctcacttctaataagctttggttaaaaaagagtttacagtgggatttaaaaaatagaaagtatggtattgtcaaagttgtggaaatgaatcaaacacttgccacatttgatcaaacttttctcttttaagaaacatttggtcaaactaatataacttaagtgtggcaaaattcctcgcaaaaaaaaagtgtggcaaaatgaggcaccaaacagatccatcatccatagcctcggttggctctactttaagctagcgagcagaaaacaatgatatgtggtctaaatttgagcactgctcttgatgtttttgcctttgtcgttttgctatgtatttccttagtttaatgtgtaaaaaggtcataataaatatgtgaagctctgtttgtgaagctcgactagctttttggtgggctagcttagtttactggcgtcactggcagctgtcactggcgtcatttttttttaaattacacagtacaacgcaaacactcacaacgcacgcgcactcatccctatgaacacacgcacgcaaaccctacccctatgagcatcttcgaagactgggccggcaaattctggagagattgacaaagtcaccacaggcacctcgttgtcgacgggtacatcgcctactactgaaagcacaacgccgttaaatcctgtaaaattcgctcccatggggagtcgaacctaggacctcaggtgctactgaggctcttgtaaccactaggctacaggccctttcgctcactggcgtcatgtttgtgaagctccattgtgccaacaataacaccatatacatatcttaaagtagaaatggtaatttctccatggagccaggtcccctgcagggaccagaccctagggagcgggggtgggttcattttttgacccacgggggagtcgggtccggggccctgcatttaggtggggaggggacgggggacatttcacccgcggccccccgcgggtgtacgttaaccctcacaatgtagcccatataaggtctaaaagagcccaatccaataaaatacttatatatacacgaaaccctagccttatctcttcagtctctggtctccccatctcatctcccgtgcgcgcacccatatcacatatagggaggcggcaggacgctaggggcagcgcaccggcaccacgcatgacgcatcccctcgccattcccagtcgttcgctccctcccttctcctccggactccgagtcccatgaaccagaaccacgcactctggtctcgccgtcccggtcgccctctccctctcccctccagcctcccgctacctaatgcggggccccggagggggacggggatggggcctgatttggccctacatctcgagtcggggtcgggggttgggggcggggttgttccagcccaacccggcccgccccgccccgttgccatccctatctgaaagggagctcaatctacccccacaatggttccttcttaatagaaagagggcataagggggttaagtgtccatattcaacagttgaagggtgtatgttgtctgtttttgtggttgagaggggtaaatcgaacttttgtagttgaaggggttgttgtaaaacagacttaaccttttttttaaaaaaaaaatcccctatcagcacaagaaggaataagtccactcgtcgtccctcagctttacctcgaatttacttgacatccctaaactataataccagaaatcttcttctcatctttgcaaaaaccatccaagttaggtccactatggatgcttgtttgggctaagggcatggccaacgcaaggtatagcctcataaaaaaggtgatgccaagtgggatgaaaccacacttctgatatctctcacatattgcaagccatactcccatcttattggagaaagccatcctagcagccggcctgaggttgtctcgcaagtcggagcccaattctacagcttcaacccgccgccacggcctagcctaatccactggccacggcccaactagccgccacgactgaagaatccagaagctccacccctcgaaccctaaaccctaattcatcatccatcccgtcccatatataaccacagccttcgcagctgttattcccatcgctgcctccacccccgccgcagcaaatctcctcctcatcttttccccatcgttgtacgccgcatctcccttagggatggcaatggggccccgttccccggtctccgacggagaattcctctattagggtgagttaacggggtgaaatcatcccccacgggggtagaaaacggctgaaattagggttaattggatacatgccattaaaaatttgttggttttgaaatataccattactatttgcgtatttggaaatataccattataatttcacacatattcaaaagataccacttcttatcccttggatacattaaaaaaaaagaccaaaataccccttttcccatcttcttccttcttcccctttctccttcctcctctcttccttctcaggtcttagcggcccggctgcagcagtggcgtggctcggcccggcggcggcaacagcagcgcagcggcgagcggcggcagcaacagcggcgcacgcgcagcccggcggcggcagcagccgcgatggcagcagcagcggcacacggcgcggcgagcagcgcaagcagcaggagcagcggagtgagcgacgtggcggcagcaatggtggtggagcaggcggcgtaggggtagaagatgtggaagagagagatgtagaagatgaggacattttcgtctaatatatgcaaaatacgtatttcggtggcaccgttaagattacaaacaaatagcaatggcatcgttacaaatatgcaaatagtaatgacattttaaaaccagtaaatttttaatggtatggatctaattaacccctgaaattaggccccatcgggtgggctggggacggggtcgttccaccactccccggcccgtatccccatggggcccaagatatatcagcccatgagcaaatccctagggtgtcagtccattctaaaaaataacagcccaactatgaggcccacttagagataatatatatagaaaaaccctaatcccgtgatgccgtcccacccccactccgccgccgctcacaaccacgtgcgcacagaaaacacatcgcgttttttctttctcccatctaccgatccctaattccccattcctctcttttctctgaatagaagtccgattggtgaggcgaggcgacgccagggagccagcgaggcagcgacgtgcctccaggccgcgcgccgccgtcgccgcctcgaagctccctgcgccgccgtcgtaggttagtagcgtgccgctgccgctgccgtgtgtgtggagccgccgtcgcatgtgatgtgtactctgttgaactccaaaacatgtgagcttgttatgtactgcatgtgatgtgctgctatgatgctatgcatgcaccgatgtactgcttaagtttatgtgatgaacttgttaagtttaatgtttgttggagtaagtttactatgttttcttcttcctgtaatcctgttgttgcttgcttgctgtttttctgtttctttcgggtgctgagacccggcgggtgccccgtacccgctgcggggacggggacgggggaaatctaccccctgtgcggggatggggaaggggaacgttctgttttttatgctgtggggatgggtacggggtgcacaaacccgacgggggcagccccgttgccatccctaatctccctccagtccctccctaccacagccacagccagatccgcttattcttgcgcacttttttctgcatcctgcgatttattttgtttcgttttgatcttttttttcacggttgttttgttgttttattatgcaagcgatgcgatggcagtgacgacctggtaatattcaagctcaacagaccaaatcacaggtctttctctctggatctactcctcagggattgatttgtatgccgatttttccgctgaaccgagccatctgattttgctcttttttcttatctggtttaattgtttttctgttaaaaattgctatctttctcgattccttattggtttatattcgtgttctttgcactggaggagtctattgcgatgaggatattaagctccctcttctgaaggcattgaggacactcgctggcagaatcgaaccaattaacaaagccaccactgagtaacttgaaatcctccttcaatttgttctgctatgttttttctgttgtttttcttagatctgtttggattgtgaggaggtaattgatgcataatccaacacttgatcagaggacggcttctgtcgtccatgtgacgttacacatctttgcatctgaatccaatcacagaacagatcttatcgtttatggttttatgtggattttttacagtatcagaggatgaaaccttataacaatcttaggacaccttctgacacagtgctataacactgtgaatgagaaggcttttctttctgatgatgctttaaagatcatttttatattcttttctttaaatcttgcgtgttctataattttttctccttcctatatctacgattttaagcctatgatgattagcatattgttggaattaccgtcagattatcaaatgacgacatttgtctggcatcctgaggctttataatccagtaatattgtagtgtataaagatctagattttgttcatgtattatgagttgcaatctagtcccagtgaggattctatgaccataggaagtgccgtatgacactttaaacagcagctgcttttctcatttgcaagtgtccatccttcgaccataacctttgtggtttggtctgggatggagtacccatttgcaattggttaattcagctgtgtgtgtgattttaaacgggtctcttgagggattatgcgaagctgtctcataataatatagaatttgtatctgttattttgtgatagtttgggcctgatgccacgtcacctgtagctacggctttgaccggtgatgctttgattaggccaaaacagagttggtttcctacgtttcacatgttgataggaacctgggactgcatctccatcggtctacagagcccgtatctgtcattacatttgatttatttgaattaacaaccttttttgttttgcttttatttttttggtcccttgattatatggcaatgatgataaatttaaggcttgtttctcataacattcgcagttgccgcctaagagctttcgccctgccaggcttgagagctaatgctgttaattccttccttggatgtctgagccattttcttcatgcaagtttatttgttgttcttctgtaaattggtgatctgcatggcaaatgatgctaaaagcaaggcttgtttctcataacattcgcagttgccgcctaagagctttcgccttgccaggtttgagagctaatgctgctaattccttccttggatgtctgatgcaatgcaacaccaactgtattctctttaaattattgttttgccacttctataattaatgtttactgaatgtaagtgagctgttgatggacgcctaatgatgctaaaatttctcatagcatctgcagttactgcctaatagctttcgccctgccaggcttgagagctagtgctgttaaatccttcgttgaatgcatacccaagctcactattttgatcaacctgtgtttttaataaatataaattctaaaagttcgatgaaatgttgatttcatgtgaaacttgtctgttcgagttgtgaattcagctattgagacagtgaaaagagcagttattccacaagatccagctattgagacagtgaaaagagcagttattccacaagatcagaactagacaagaacacttccaacctgtaaaatcttattttgtactattggctgtaatgacaatatgcggactatgagatgtatttgtagtatgcaatatccgttgtgatttttgcataacaagcagctgattatattttattattcatcttgcattgtcatactgtgagggtctgtagtattttgtctttatttaacagtctgttcctctactatgtttctattatgtttatgcatggagatttagtgtgaaagctacttggcggctaagctgagaagaggatctaactgattcgtagatgttctgcggacaattcttcggcagaaatttccttctcctgaattctgttctaaatttgtcaactcaattcacaatatatgtacattgttcagctttccataccgttaattacagttattccaatcactatcgccccatcttatcagatttgcataacgctcagttcagtactgccgataatttgttgctgcatggtgtgagatggtggaacgtgagattgggtttttcttcagtgtgtcctcaaaaccgattttcaaactaatcaaactaacacggctgctcagataacattgttatatttgggaaggtttggtgataaaaataaaatagtaataacttttggaagaaaaaaaaatggaacttttggatgaaggtggtattgtcagtgtgtaattcgctgaaaaccaccttcattaccccctcgtgtaacagttgcttggtcatttgttgtgtaacaagtgtcaaaattaatgagaattgaatactgctacacggaataacttattttctaaatttactaacaatcatctcaaacatttgatttagatagataaaaattataaaaaatctatatacactcataacatgataaattagtgttagtaagaattttgttggtaaaagaaaatgagtatgtatagctttttttcccctttcttttcgtttttcaccttactcttcggataaccaagcaactgtcagacgattctcattaatttttaggtcatcagcattctcattacttctcattaggttcttttagttcctggaaaataactaattacatataaaccaaaagaacctaaaagctctttacaaattacaagccacggcaaaagaacacacgatgagagaagacaatacaaaccactaaaccagtatcatatcatatggttcagtgtgcaggatccacaataatcgatctgacactggaggttcgtcgacattctcaaccttcgatgtcccttcgatctcctgaattctgctgcaccgctgtagccaaaaatccatcttgtagacttcataaattgtcttcaggtcgtatccaaacagggtgcgggccatgtagagttcgtcgtcagatttgacgagatataaatatgagcgtaatttatatacccgaaaaaaaaatatccgtcaatcacgtcagttgttgtgatcttgctgaacacaggcgcagggcagaactcgagcacgcctagctagccggccaggccgttgaagtaaaaacttcccctgacaagctgctatcgggcaaatgggcagtttttctttgacggcctgcgtcccaaatatcgtacttgtacctcgtccactcctcgtcgacacaacagtacaaaagcacaggggagacaggctcatcgagaagcacaaagcaccggagatgagaaggcgtgccggagaggaggcaactgctgaagtcagtacttctctccctcgtaatataagagattttaattttttttcttatactgttttaccacttctcttatttaaaaaatttgtgtaatataaaaaaataaaaagttgtgcttaaagtactttggataataaagtaagtcacaaataaaataaataataattccaaaatttgttttgaatgagaagaatggtcaaacagtgtaagtaaaaagtcaaaatctattatattatgggacggagggagtatttggtaggcgtggcaggcagttgaatcttggtccaaaggacatggaagatggaggtggtgacattatgcacagaatccaaccctgttgctattgttcttcaacacctcaagtgctcaaccatgttgtcacaggtggtcttcttctcagggatgctgaattatatcaccggcttgtttgaatctacaccgtccttaagggcgaggcagggaagaagaagaggaacacgctcgacgtatccatcttatcgcaagattgtcactattggctgtatcggcggagaaaagagtaaccacctgtctcaactcatggaaacgagggagggtgtagagattaccgactagtccaaagctcgaaattaaccaaacgcgactacgcgaaaccggagccggagtacgatacgttggtttggttgtgttagaggatctccaacaacctctctaactatctctccaagttaaaatttgacaactctagcaaaaaataacatgctccaacagcctctccaactggatggctaagccatccggctggccaaatctctccactcattggtcaaatttggccatccaaactcacttgccaaaagtaggccccacaactctctctctaccatgaaaaggttctagccgaatccaccacgagaccacgatgacggtgacggtggcacggcgagggcaagagcgggagggcgcgccggcggcacggcgagggcacggcgagggcgggacgacatggtggtgggtgccggcctcctagcgccgcctctgccccgcatcaactcgtggaaggacgagatgggggcgaggatggagggagtagcagatgcggctttgctcgacagtgaggtcggtggtggtggcgatgtggcttgacggcgagctcggccagagcagcaccagcaggaggagcccgagcggcagcagagggcggatggggatggagcccaagctcggcccgagtggcggcgccggcggatggggacgcggcccgagcggcgacgacggtgagggaggagcgagggaggccagtgaggagcggatccgctcgctgcagcccgccagctcagcgtcgtctccactcaccgctcgctactgtcccccggcctgcctcccacgtctgtcgccttcgcgcccacgagtcgccgccgccgtccgccgttgaagggcagaagagatttacatatgggtcctatttgtcatagacttataatggagatagtagatggagaagctgttggagtaaacaacgagtttgactagctaaattagatggagagttagacaaatagacatttggagaggttattgaagatgctcttaagcagggaaccataaccgcacacgaagtgggtacccaccttcaactcaacatgccgtgcactaacttttgggcccataaccataaagcacggtgtttgcgaggtacttagaggtggagcaatatgaaccattgatcaagagaggggcaaagtatggaacaaaattattataatatgacggcagtagagtaattaattagtaaaatatggacatttcatatgaattgaatacttggctctattgatcggtattgttgtatagattggtattgctgtagataaaaaaacgtgaatcatggatactccattgatttagcgatcgattcgatctgtaatgaggaaaaaaaaaagaaaagatcatgtatcctttcttctctaccttcacttcattattgttctaggactttaaatggttcaccaaaggagacaaagggataagcaccgacatggttaagggttgaagaagagacgagatcggccggtcgacggctagatgcaagcgcatcggtaagatatctaggacatatgtgcgcacttgattagctatttatgtagtttacaaattccttgaataagaaattgaatcgagatctcctcctatatgttcttcaagggtttgaatgggtacacccacaaggagagatagcgtggaagaagctcaatccttcatgttttatacagataaattaataaaatgtataacttaaaatgacgaattatccttcatgttttatacggataaatcaataaaatgtataacttaaaacgatgcaaaccttcgattatattttaacaggttatgtttttaaaacacaatataatctctccgcgtaaaataaatataagtctcaaatgaattaaagggataagttttgacatgttctttagaacataacataaatctagaaaaaaaaacatgatcaataacttttactctactaacgtgttttctgaaacaaaacataaatttagagaaaatcatgcaaataagaatagcaaagtacataacgtaaatatagaggaaaccatacaaataagaaacactaagctagttcccgtaaatgactaactggtacctatacggtaccgattaaaattagggacaattctaccattttctaccaactagtgcacttatgtttttatctggtatctaagtaactagcgttgggtttttacatttttttggaatgcaaatcctgtaaaagttctcctttttttgtgcctaaccgcttcgcggtgggctctgcccgcatcctgcgcctacacgcgtcgttgcaccggcacgatacgccgcaccatatatgcacggtgcacgtggctgctgggctccgccggtgtaacgagccacccagctgccggcaatcgtttccgtcccatcccctcggcggcgcgcccccgtcgaccggaaattgccctggccaccgcgccgttccgcgcgctcccggcggcccaggacgagctgcagcatgcactgtgcacacacctcactgtacatgggggcgaggtgaccatcgccatcgaatcgcacgagaaagctagcccagtcgaaagctacgcgcggagacgggatgggttcgttgtctcgttgaattactcccaccgatcgatcccaccgcatgtctgcgtcgtgccccttttcccccggccgaccacgcacgattgcacgcacgcacgcacgcaccgcaccgcatgcattggttgtgaggcggcgagacgcgagactagagttgaattgttatctataggctatgtataagagatccatgtcaccatatttttctacatggaagagattaaatgaagagagagaaagcaaagctatctactagtctagagatagtctatagagaaaaacaaggcaatggattagagagctatagatacccatatagacatactattgaggtgatttactattaatctaatctattgttgagatgtatatgttttacagagaacaccttactttaccattgtgggtgccattaccattgtgggtgccattaaaggaaggatgctgtaattgtagtattgtactattattaagtgtgtcctaccatgggcacagtgccgacggtatcacaaaaggcttcatatatccttgttaaccccgagggtcaaatttaacggctacgtatgtggtcagtgcttgcttaccactatcttgatgcccgtgattatggccttggatatcttaggccgcggcttggctacttgattacgacgttcaagcacgccgcattggcacgatcgagtatcaaatattattgcgcccatctttggatcaaaccgctagataactagtactaccactccagtaatgtacagcactagctagctatgagtgtaaataaacggactcccgattgagtgtgtgtactcgtgttcacgaaatcactatcgacgtcacgcccatatcgttttctcctctttgccatgcgtgcggtcacgggcgcgctagccgctagccgccgagagatctctcattgtcatcaacacgaacctctgggaacagacgaacgacgcagggccagctgcatagtggcaacatcaaaattttttgtccagctgttgctagcacatttgcacacctcgacactagccatcagcgaaccggattctctagctcacggggcctcgctctcgacgaagaaaaatgcacgcacatgaaggaacaaaagaaaacagagatcattccttctcatgccattacagtgcgacgcggcacggacgggataaaggtgaaagcggctttggcgagagacttttgtaacgctcggtcggcagcgcagctgcgcaaagcaaagcttggcgatcgacgcgacgaagaggacatgcatggcaaagcagaatggcaaaaggcagcagcagcaaatcgatcgatcaaatcgtggcaatgggccggtggtgcgtgagcgcgatcggttgcctgtggacgctataaataggggcatggcacgggacatccactgcaagtgcaacacaagtacgcagagccaagaaacagagcaagagtgagtgagagagagcttgcaatggaaagaagcggtgagcggcggcgagagagggtggtggcggcggctcttgcggtgctcctcctcgtcttcgcgtccgcgttcgtgcggtgcaggggcgacgccgacggcgagggggacggcgccggcgcggccgagccgggaaagacggggccgccgctgccgcccgggtggaagggcggctcggggtccggccaggggtccagccccgacggtgcttggaggtatggctggggctgggccgctagccctggcggcaagggctccgggttcgggtttgggtacggtggcagcagaggcgaaggtggcggcggcggtggcggcggcggcggaggaagcggtcgagcatatggtttcggtggaggatacggtggccaccccggaggctttggaggtggcggtggcggtggcggcggcggcggcggccgcaactatggtggcggcagcggcggcattggaggatatggcaactatggtggtggctataatggggaacctggagggggtggtggcggagccggagaaggtggtggatatggcggggattatggcggcggcgatgtcggtgcaaactggagcaagcgcgggagcttccgcggcggcggcggcaagacacagcagaaggacggtggcggtaacaactgaagccgcccgtcctcgtcttcctcctctggccatgagacgaaccatgagcttcataactagagcaatgtataggaatctcctaagatatatatagtgtcatgtcatccatgctacgttatcaactggggaacgctgatgtacgagcttcaatttgagcatagcggtaccgtacgtgctgtgttcttcaggctttgtaactggtagtaccttctactacgatggttcatgccccaaatgccaatatagtactcgacttgtgaattggtgatacgccatgctagctagttgcttctgcgctgtgttcgtggcggaattccgtctggcttgcgtttccaacttcctgaataatcgacctgcatgtcagatttctgaagcaaagctagatgtaaccgaaggctattcggcataacgtattggatggcatgaaaacataaattctctgctagtctgctactattgtctgatgtatagcggagctgctatggattaccaaatgtgaaatacggcaattttgattttcttttaagttaaattcttgaaagtttgatcaagtttatagaaaaatataacaacacttatataacaccaaattaatttcactacatctattacctctatcccataataattgtatttatagggtttgaatttgtcccaaaataattatcacaatagagtactaatgatcctattaatcacttctcatccaaatttcttcctattttaccctcaactactctccactcttacctataaaccgtttgacaaggggtattatagtctttttttctcaaatctcaatatatgctaaacaacctagaataacaattaatatatgtaacatttaacatattttggtagtttctttgttttatgtttaaaattttattacatttttctgtaaacttggtcaaacctaacaacgtttaacttaaaaaaagttaaaacaacttataatatagaagggtggcacctccaaccacggcttgctccccatccccatcctcatccctttcaccgtctgcagcctctgccatccatctctccctcaccgattgcgccgctctctcatcctccacatccaaccgtgagctctagcaccctatcttgggctccattggtctagaaatcataaaaaaaaaacactaaagggtaagtagtgatacatatcaaataatcaagaaattgtaatagcatgattccaaataaatgaataataataacatgtttctaaagtcgaaaatttataatagtatggatccaattaaacatataatttatgccctagtgtacaaagctataatataaaccatgggccaatattcattatgggctaaacttttcagcatattcagagtacagtggtcactactaattgggccatgcccagggcctctattagtattcggcctactgcagttttgtggggattctggtaactgtataaatgaaaaataatatttgggcctctcttttttaagtaatggctcaatcactaactaatccactacacatattttcttatgaaggttacagaattctcctattcttctatatgctcttgtgtttcaattcttaaaaggagagagaagttgtgataaacaatatgattattcgtggtggcggaagtcagcagtgaagacgacgactcctcgaggagataggttgtgacggtagctcggcttaggttgtggtctacgatgacaatgtcgtggtagtagcatatcactgacgagataagctacggcaactcagtggaggtcatggtttcggacaaagaagatgtagcggcggatgttctccggtgagataagcttcgacggctttgcagaggtgaggttatgcggcaatgatttttttttggggggggagggggacatcatagcgccattgaattttggcaagataagctgtggcagctcaggggaggtgttagtctatgacgacgacgacatgacagcgatgaacatattcacgttcagggagcacagtttgttcggacatcacgaaaccggtgcttatcgatgacaaggcggttgggtggactagttctgtccccttcctttgttcatgacggagcagaggaacttttatggttgttgtaacaacaacgagagggtgtggaggtggaagagcgggctagctccgcattcccctaaagtttgaagtgatgagggaaaatttgaagctagtctcttctaatattttcttttagtttgcttgtttttctgtgtatcttaatgaactcgtgtaatatttagttgtgtatatctacttatggatatagataccgtacttctatcttattacctaaaagaatgataattaattagctgacaagtaagctcataagctatgggtagttaacatatgttcgtagccaaattgttttttcattgcaactcgtagaaattaaatttgattttatatgtttgtggagtgatttctcacatattaatctattatttttttcataatcatttgaatgacatacaaataacgagagaatatctcctaaaaaaattagaatagtttcctatactgtagtactacctctgtcaaaattacttgtcgttttgagtttttgtttataacgttttacaatttgtcttattcaaaagattattgaattattatttattttgtttgtggcttactttattatcaaaagtactataagtatggcctatctttttatatatgtactaactttttaaataagatgaatggtcaaacgttaaaagcaataaatcaaaacgacatctaatttggaacggagcggccatagatactactggcatagtatttcatttccctccagtacccaagatttcggtgcctgtaattattgtgatagtcataggagcttggtgagcccccctcccgcccattgcttacggtcacatctcttgcctttcagtagtggttggcgcatccaccgtgtgtgagaacgccagtctgagctatatggtcgactacatacttcacttccaagattgaaaattactttttccatcaaaatttacataggatcaaattgcataaatgtttcactgatctacaccattagtacacaccgaaacaaaaaaagaaaaaaagaaaaagaacaaaggagtgcacagcaagaatgcactgctgtacgcatcatgcaggaggagagggcgatcgaccacctattagctactatagctagcaggctaactaaactaatcaaagcaactgccacactaactaatactccagcacgtaggacagatcacatgtatgtacgcagtgtgacatgctagcttgcttccatggccgcttcacgcagcgagctgctgctgctgctgccggcatcgtcctcggacaggcagcagtagtgcagcctcgtcggcggcgccgcgcagagcatctcggactggagcacggcgcagtagtcggcgaacgtctccggcgtcacgttcaggtcgaaccctacgccgaacaggaagtccacctcgaggtagttcatctccgccaggctgatgcccccgaccttggcgaagtaggcgttgttgtagcatctgaatatatatatacagatcgatcgatcatgtcaaaagtcaaaacaattcggctgttaatcttttcagacaaaaagaaattaatgacagtattattgtatattgcctgtatgctccgtccattctttcagatcgtttatgattgctctccaatgattgacggcacaatcaccagtagcatcgaagggatcgatcaagcgaccgaacaaaatcgcaaccacaaatcaccgaattggccccaaacgggctcattcagtacgccaagttggcaattaagtattgtcacagtagtgtcgctcttactcttaagaaaaagctagaaaaaagagatgctcccgatgaggccctgacacggggaaattgagctgcaaacatcagcagcaagggcaagttgccagtcccaatcccccacaactggcactgaattaaattccaaacaaaaaggcgagggggtccttgtgcagggtggaattctggtttgtgttcttgggtccacggtggatgtgtgtggttggacgcaaggaatagtgaaatgataccacctcatttttttttgctttgctggacaagcataattctgtccatgtactgcgtttgtttgcgtggacaaatcactttgggtacccggtgcaaagcctagttttgacagcaaagttgaggtggaaacctttcccagtggcttctttggagcatgattaccgacaattaatagctggtggttgctgtgatattcagatgtaactatttcggaggttctctttgccttccgtttcaagactgtaaggaaaaactcattttggaattgtaaaaacagaaaaattcctgaactagggaccgaaatgattctggagttacttcgaagacactcccagtttattcctagctggcagtgtctcgaacaagggaagtttgtgaatagaacaaaactatgtcgagtaggaataagaaacaaagtgattgaaattatccaactataagttgaacccaaagcacggtacaaaattcaggtgattcatcaaatatccatcggcgattcaccactcaggtgtgttgaaatttagttctctgtaaatattgacaacccgagtaattaaacaagattacaagaacatgccaggaacagagtgagttctattgcaaattcattttttcttctctagaaccaatcaagaagatgatcgtgttacgtgtaaacgtgcctgcatattagctggttaaaaccgttctgttacttgatcatgagaccgtaaatgcgtgaagagtggcagcagagtttgcagagaaaactcacatgtcatccatgaacttgactgcggagagcacggcggtgatgaggagccgatgcacgctgtaggagtcgacggcgagggcgagggcgaggcaccgccggccgcggcgcaggagccggtcgaggtagatgtaggcgacgacgtagcacgccgggctgcacccggcgaaccgcgcgatgcgcgccgcgtacgcgcggacggagatgcccggcttggccgtcgcccggaacggcgacgccggcgccgcggcgagctccgcgggcgtcgcggccgcgtcgttgcgccccgcgacgcgctccaggatgccggcgagcgcggcgaccacccgcggcatgtcctggtgggcgctctcccccaccagctctgcgccctcggccatggcttcccttgcctcgctccgcaggcgcgcgttggcggcgcacgtgatgtgctgacccggcctcagagctggtggggagcagctgaagttcgggagagagcacggaatccgttatatggaacggaagcaagagggaaaatgatatcccagagatgtgacaccgcttctgttaaggtctttgcatgacatttcagcaaaaaatagtcttcaaacagggcaacatattctatgcacacatgccctcacgtgtacacacgtgcacaccaactaaaaaatgtcaccaaaaaatctagaaaaaatcatacacatactttcaattgtattacacctagagttaaaatcttaacgtcaaattcattatattttagccgtaacaaaaaatctgacagttttaaggttacaattttgtcagaattttatcttttttgttattctctatgtagaatgaatttgaatatacgactttgcacgtagatataatactattaaaagtacatgtataaatttttctagaattttttgtgaaaatttttagttggtgtacacggtgtacacgcgagaacctgtgtgcatatatacgctcccttcaaacagaggcgatacaagggacgcagccacgcaggcaccaccgcagcagacagcaggtgaggagtcgcgaccgcggagataaaaatagcgggctcgccgcatccgccgggacgggtgctccgcacggcgctggaggaaatcaacgcaatttggggcgcattggaccgtgtcaccctcttctcctctgggcccaaccaggatgcccgcgaacgtgcgtcctgcctcctcaagttgggccgggacgggatccctgcgcacgcagtgaccgggccgtgtttcctaggccatcatgatgggccagcgcgtgtaggtggagctcatgatcgaagattcgaaggtgacacacccactcacctcgatttcatggcaagctcgatcgatctcacagtgttaattttttcttcagcgaccacattttgaggccctccccgatggatgaccacaataccagaccgatcgattcgcgtgcagctgcatgcctgcatgccctccctatgcatggctagcttctgaatacacacaccagctgaaagacgccgaggagatgcgagcacgcgagtgttgatggcggttttgtttgcgagcccctgttcgttttcgccggaactgcaggttctctgttgcaacaatcattagcgcgcatcgatcgaagcatatatgtgcatcgatgcacatatacgtaggagtacatacaagtacgcagaggagcgccgcgctgatgagcctgtgttgttttttctcctccttttagttcctgtgttgtgtgttctgtcaggcctgcgctcatcagtacgtagtatatgatcaaacttagtacaccaaagtggaaaaaaaaataaaggtgtacaatatgatctactacctctgtcctaaaataagtgtagcaataggtatccgtgtccaatgtttgaccgtccgtcttatttaaaaaatttatgaaaaaattaaaaaaaaaatagtcatacataagtattatttatattttatcatctaacaacaataaaaatactaatcataaaaaaaattaaataagacgaacggtcaaacgttagatatgaatagtacagaattgtagttgttttgggacggagggagtaacttaggactcacggatactacctccaaccaaaaaataaacctactccatccgtcccataaagaacgcatttttggatttctgtatctagtttcctgtccatcttatttgaaatatttatggaacaaataaaaaaatagttatacataaaataatatttatgttttatcatctaataataataatactaatcataaaaaaattaaataagacgaagagtcaaatgttctataaaaataaaaaaaaatgcactctttatcggacggaggggagtatactctttacgagacatcgtataaaatatgagataacgtactagatttattttttatcgtaggaagggaatacctgtatgcgcatgcatgcagaattgcagatcaccggacttgcagtgtagtactgcatccatgaactgatctcaaagtgagtatataggatgtgtttagattccaaaaaaatttggtcaaaaaagtcttgatgtttgaacacacgcatggagcattaaatgtggtcgaaattttttttgcatagtttgcatgtaaattgcgagatggatcttttgagcctaattgcgccatgatttgacaatgtggtgctatagtaaacatttgttaatgacggattaattagacttacagtaaattcgtctcgcagtctacaggtggaatctgtaatttgttttattattaatctacgtttaatactttaaatgtgtgtccatatgcttaaaaaaaatttggacgatgaactaaacacggcaatagctagttatagtcgtaaagtgaactgcgttcatgaaaacactttccccagtactatatactccctccgtcttaaaaaaaacgaatcttgtactgaatgtgacatattctagtataatgaatctggatagaggtatgtccagattcgtagtgctaggatgtgtaacatctagtactatattggtccaatattggagttttttatgtgtaacacaaactttgcatgtgctgatgtgtttatagaagaaatacatagcttaatttattgactgctgcttgtaaattgtacgtgcatgcacgcaatacatctcacgtatagctagcagtactggtacattgcgcaggcatggctcgatattacgtcgcctatatatctcaaccatcaaaatgaaagagagctagagctagccacagttaatcgatcaaacggtggacatataggtatacgacggtatatatattgatggatggatcaacgacgaaaatgcaaagtgctaaaatcttcagaaggagctgaagcagttggtgtgctcgccggaggagttgtcgtcgcagggggagtgcgtgtggcggccctcgtaggtggtgatcaccatgcggcagtccgtcgacagccgctccacccgcttcttcacgcggcagttgctgtgcgtgcacctgaagtagctcctgcatgcatgcatatgcgcattcatatatatatcgtcgatcagttttggcatgtgtacatccaaatcacacaaaaatgcctgtttgtagttctgatctccaacagatcagaagctccgcaaaacaagagattatattcatggtgtcctcctatatacttcctccgtttcacaatgtaagtcattctaatatttcccacattcatattgatgttaatgaatctagatagatatatatgtctagattcattaacatcaatataaatgtagaaaatgctagaatgacttacattatgaaacggatggagtactagtctatcccttatactaggggacggagggagtactgactaacaaatttccatttctcaatctaatatatagattaaaaaaatatagatgtgtttatttactgaaatgaaaggactattacatgtttttttagatatttggcagtgcgatgactcccgcatgcgacgtaattagctaattgacaacattaattaatttttatcgatcgagttctgcaaggagatgggagttagattgggcccgcgcatcgcagcggaagttctgtataataatagaacaaataacatgtaaaaatagctagatgacggatgacgtaattttatataattttcatctttgatcgaccatgaaaaaagttaaaaatagtttagatggcgtgatttttaataatttaaatcatatataaattgatcattaaaaagtaaaactaaggtgatatgcctcaacgacaaaataaaaaaaaggagaaataatatagattaatcatctaaagacaaaactaaggtgatataacttcgtatgagaaagaaaatgataaaaataatttggaccataaattaatcatctaagtgtcaaagacaattgaggtgatatggtttaatgagataaagaaatagtatcattatatgaacattatacatagatatataagatgccagatacagtgcagtatactcctaacacagcttctcacaaacggatgtatgaatttggaactgaagcatctttcttattaatgtaccttttgtgcctatgttaattggctgctaattgccgtttattttatcgcatgaaatagctaaggcttacactacttgtgttgtatgagtgtgtagaatggcatgcatcgtccttagttttgcaaatttagggtcctctctttcatggtgccaatattaggatccgttataccttaattaattaccccaagactccttctcatacatgcatattcagaatatttgtggtaagaactcgatccttaatctatttatgacccgtccctttatctgcatcagggatgacagtacctatcataaattaaagaactgatacggctagttatgtatgatgagtttgttaaacttgtcaccgaaatgtaactagtaactaattaagcttgttcaccaaaatgtaacaatttgcattaaaaatatttttttaataaaactgtgcagaaggtgagcctgtcagattcagctcaatagattattttcattgttataacaaagtgaaccccaatttaattaaaataccaattaattcttggaccttaattaactagtacataattaagattatttgcaagggtcatctgatgacaagtgtgtgaaacttttccatatactggcgaacacttttgacatatggatcatataatttgacagcaatatgttataggagtagctgcgtttatttcgattgtaggtagaagcaaaataaacatatatatcataagtacagagctaatagataagcacataccaaattaaatgaggaattttacatttcccttgttaagagataccatattttctattgtaaagacttggtagtaccttaaatactaattacagaggtaccagaatttacattaaaaacggtggcacctcctaacatctcttaagtactgtaaaatcgcttttaactatattgatataaaaaggaaaagtaataatctagcctgcatatatataattatatttgtagatattttgccttgtcttaaatcagcttctaatctattcatatcaagacctttgttgacaagttagtttaaccaggcatgcattaattctcttctgccatagagagtacccttggtatatttggtttggaggaatttcacgagaattttggagaaattgaaatgtttcctgtgaaaatcctacaaattttccatgttctgaagaagccctttaggagaaaaaacaagatcaacattgctcagttctgtacatataaaattgatattttatctggtatatataaacttgcgtattactaattaaccaaattaaataggcatcgagacattcttctgtttatgtttataattagttaattgataagaaacggggaatctattatctacacatatgtataaatgatataagaaatcaaatatgtagggttttggttaagttgagcatatgtacctgggatggagactgttcttgacaaccttctgtccgtacttcctccacttgtacccgtcatccagcacatccacttcgcttctggtctggaagcagaacctcggctccctcatcttcctcctgatcttcatcttccccttctcccccatcgccgccatcgtcgagcccctccacctgcaagctcccacaactggagatctcagcatgggtttgcatctatcttatgttttcactatatgcacgcgtaccatgtagtggagccattgcaagtagtactctcattgccagctttggttacagtggtggccacctgaagaacaagatcatactctatgagaattagtaaggaacaagaaaagagaccttgttgataatcagaataaaatctagcccagccagtttacctcctcagcgccgccaatattgggcatggaaccggcggctgcactgtgcttccccaatgcgacggttgcggcggcggcggcggcggagttgcttaacggaagcgccggcagagggtacagcccgcagtggtcagaagagagcatcacgccatggattccgggctgatcttcttggtcgaatggcatctggagtagcttcggatggcacggtagttgaagtggaggaggaagaggcatgccgtggtgatctggcaaaagatagaaattcggaagacaagtccccagttggccacctccttccatgcaagtatgcatatggctatagctatatcgtgtgtggcgtttgtggcagtagtagtgatctctatctatcgccaatcgatcaaagtggctcttgggacataggatttcttgggatagatctcctctccctgtctttttggtgtcaatttttgatagggtttgatgctttcagggtctaagtggtgggctatggctctctggactttggagtctaggctgccctttaaagggctttttgctcaaattgtgtcgtgggtacagtgcctgcttcagtagctgttgccctctccttgagctagctaggtatagtgcatgctaatttatcggctcttggcaagatgtcggatctgccttctgtagctgatatgtgtactacttatatagatgtcggatcacaactgattaatcgttaatcatgttttctatgagaaacgctgttgctatgatatttggttcttgaactttcatcagtgccacgagcttcctgtttcagtcgatatatatgtttcatgtttctataccagattagctagttaattgcaactttagtgttgtgtaagccagaaacttttggccactactttgaatctgtgatcagcagggctttttcaggctgggcgcatgtattattgcagcgattgttccgcgtacaggatagcactgattgtaccttttgttccctgcaattgccagatcatttatatgacttttggatagatgctcctcacaaaagatcatactggtgctcatagttctctgtgatgcgcacctatgtgaatcaactctagtcttttcctgaatcatcactatcctactttattgggtgcgtatgtatatctagggtacgtgtgtcttccgaaagggactggttttgatgtttattcacaaattaatatccacaattaaaccaataataaaacatttgactgcagtactgcctggtctcacctacctacctcccatcccatgtgttataaagccggtcccgaaatcacatcggaaaccaaatgcggaagaaacaccataggagatctaaacatggtgacgacaccgaggcgtgatatttgataacggagttcagccgagacctacatctccagggcattaattatggacgctcctccccgatccagcatattacagtgtatcagagttacaacgactcatagccggcagccactccctctcgcatgctatgtcgccctatcggttacaacaggcacgctcctctatttatgagagagcctaggatagagtccgactcttactctaatcctaacacctagtacaactccaagtcctaaactgtaaccgattgcgtacacatattcaacacaaactctaacaaactccaccttgatgaatatgccacgccaacctgaatttgttctttgcacgaaactccgtgcacctgaaattgagttgatcccttttcgccgttcacgccgagccgccccgataagactccaccaggctcaccataacaagagtcaactcctgctatccctgtaatttcttcttcttgactccacctacaacagtgctccaccttctcacctattaccacagtcgtcttgccaaacaaaatggaattccttcctaactgtcacatcatagacttccccgaagaccatgttcaactccatctaccgtcttaaagttgacttgatctaatccatggccagataaccgacgtcatcaccaaataaataaatcaaactcaccagacatgtagtgaaccctttctttcttgttgtcttatgaaccgagctaataaatccaacatccacgctttccgcatccgtagactgaatatccgataatttgagaaaattcaccattgccttaaatcacccgaagaaattaccaacatagcgattgctcttcatctttagtgacgcatattttatatatccccattatgcaagccccgcagattctggatataccctgtactgccaaacggcccgttgattccatcaacgattttcacccactgtttcccgggatttctaactgtctcgtacaactgcataactaagttaagccacccttgcaatcttgccgaaccaatactttggcttgccatatcacctcagctttacctcatgtacaaattaaccattacacacagcatggtcccaactaaccaaatccctgtgcataactaacgtagcatgcaatcagcttgttccatgcacaagccatcccaatacttcagaaaatgcatcgttgtaacttgtccttgccgtccacagttgcttcccgtgaacaactcactcagtgaaacagtactcagcccaaatgcccaatgaacggtaattgatgatggagaagcacgacttaaaaggtaggggcggtcctcatccatcagactagtcttttgggttgtgtaggtccaggacctaaagttgtgactccggttgagcttgtggtggagcaggcctcatgtgacctgggtggcccacggtcagtgggccgggctgcgcacattaacaagtggtatcagagcccaagtttagaacccggaacgattttcatgggtcacatggtgaggaggccaagtaacaagtcttcgaggtcacataggtgatgggttgatgtgacggggagattgttgggcccgaggccaggtaataagtcttcagggtcacatgggttgatgtgacggggaagattgttgttcccgatgtgtgacggggagattgttggatttagtcccatatcaataattaatgatggggagtacgacttaaaaggtggggcagtcatcacccatcagactaatcttttgagtttgttggtccaggacctaaagttgtggctcatgtttagcctgtgggggagcaggcctaatgtgacatgggtggcccatggttgatgggtcgggctacgcactctaacccatgaaaacaaacctaaaattgaatgcgacttaatctagcacaataaatttggacatgaacttaatctagcacaataaatttggacatgaggttatccagattcgtggtactagattaaatcacatccaatataaggttaatttatttttttgggactgaggaagtagctagttgctgctgaaaaaaaattatgtagcaaggttttaaaaaaacaatcaaataactagtttttatttttgaaagcatctgaacctcatacttacatacatgattcaccgggaaaggttttaaaatgcaaccggtacgtagtcaataacccctggcggtttcatcgataatcgagcggttaaatttggatttttttttgccaaaatattgaatttttgtttgattttctttaacttggctagtttacggagaggctttcgtaaatggtcggttcaataagaccgataaccatgataacttatcaattatcatcgcattttgaaaccctaccacaagatctcaaactcaacgcatcttagcttgaaagcctattgagtttcatgcactaattagttcttataagcttaaacagattagaaaaggtatacagataactcagcagggtcaaaccaacatggtctgcgtttattactcagtctgttcaggaatataagaacatatggagttttttttaagagattatggtttaggtgagaaatggttgtgatagaaaatagttgaggaaattaaataagtgaaagttgtaattggttaagataacgataactatattaggtgaggatatcttgtactcactccgtttcaggttataagacgttttgactttggtcaaagtcaaactactttaagtttgacaaattttatagaaaaaagaaataatatttttaacacaagactaatatattatgaaaatttattcaattatggatttaatgaaactatgccagtgttgtaaatattactatatttttctatagagttagtcaaacttagagtagtttaattttgaccaaagtcaaaaaaacgtcttataacctgaaacggatagaatattattaaacgaattttgaactttagatgtccttattatattcttcggcagggagtattcagttggcaaatatctatattaacacatatttgggtggcgatttaattgaaaatgtcagaagtaacatgcatttctctaaagtggatataatcacaaataagcttatgcatgcagtgcaatgatgcggcttccgcagaaatgcaggattcacgaggccgtactgatcttttccaagaaaaagaacttaaaaatcgggtaaatatgggagtatgatttttcactgagaaaaaaaaactaaaagtggggggttgcaaaagatgttggcaaaccgaacaaattgctgctagctagctgctgcaggcactcacattgatgtatccagattaagggtgtgtttagatccaaaaatttttggtcaaaaatgtcacatcaaatatttagacacattcataaagcattaaatgtagacgaaaaaagaaaccaattgcacagtttgtatgtaaattacgagacgaatcttttgagtctaattgcgccatgatttgacaatgtgatgctacagtaaacatttgctaatgacagttaattaggcttaataaattcgtctcgtggtttacaggtgaaatctgtaatttattttattattcgtttatatttaatactttaaatgtgtgtttgtatacttaaaaaagttttagccgaagaactaaacacggccttagccacggggattgcagcaggcgaaatggaggggaattcctatcattgcaccctgctgcaaaagcctcttcttcaggggcctccaattgggccactactattcatctgccatcatagcagcgatctccaattcaaaaaagaatatgcaattgcaaggcatgcacataaacatgcaatgatcaaattgagtatagcacacacatgagtacacatgacaattgacacatgcgtgaatatatccaaatagttggtccatgaagacgtgatcaggcagagacatgtgatcgccactactactactactactcctccctgctgtacttgcacagaatccccaaggactcgcatggtgtgccctagaaacggtgagacacaaagagcttgtactatacagcgctgcagagaacagcagaagcatgcacgagatgtagtagcagaatagtatgtcgtagtagcagaagcagccgcgcgcgagcctactactgccgtcccaaacatcatcagcggatgcagcggcgtgcgagaaaagaatagaaaccccaaagtggcggcgccctgatcaatccctgatgcatgcatgggtatagtagcactgtgcatatgcagagagatcacgacgacggagatatacacggagaagaggggcaaaagctaggggacaagaggagatcgacgcgtatgaaagcgagacgagagacgatatcgatgaaacgcgaacggtatgatggacaacacgtactattctgtgcgcgtgcgtgtgtgtctgtgcacgtacgtactagctagcagctagctagctagtgttgttgccatcgccaatcggaatcattcgcagctccggccggcctctccggcggcctgtcgcgttgatggggggaaatggttatgtcattttgcagctgggagatagcatggtataggcataactactattgcgtgatcggtttttgcctgatctagggtgcagcgacaaggaaggctgcagatacgttgtcccaagctctcgtcatctcgtcttctccgtttgttttatgtgtctaggagcagggaatcaatagacacataccctagttcctctaccacagaatccctgacagggaacatattatctgtggcgccggtatataaggcattaattttgctctcttctctggtccttcgcggggtctaaaattaaagatcagtatttatatatactcctttgtaagttttgctcaattaaaaatttaacaccaataatatatgtgacatttttgtaagtacatcagtactgatatcaacgtattttttaaagaaaaccgacaatgttgggattggagccgagcgagcccgttttggtttttcaagtcctccacctctctctccttctcccctcacttctctcttcctctctcatcctcaccctcgttgccaccgccactgcctcagtgcctctcctcgcctccaccactgctgccacaacccctcactttctccctctccttctctctggactccggtggccaggccaatggatttgccgccacaagcttggtggcaactagatctaaccgtcacgagatcggcagtaacgatgacgggtgctagcaagacttcatcatggaccactggtgacctcctcttctccctagtgactagggcagcggatctagcagcatggaggttgggggtcaccggatccagctgcctggaggtccctgttagcctctgaccttgccgcctgcatccctccgcctctagatctaggtgtatgtagaacttgggggattattgaatgctgttcttgttcatgcgttgattttgggaatgggatatgtcgtccatctattgaaatggggatctaggggttattgtttgttcttcatgtgttgattcgaggaacatgaaattattgattggatgtgttcttttgtatttgatagttctggatgtgtcgaccgagctgtgcatctaaaggatttagcttgatgctagaattggctcgattcatcaagtcaagcacgactctctttttttggctcacagaagtctaaatgtgttggttccccatctatcatcgtgaaaaaaattaataagatacaataatatgtaatatatctcttaacgtttaaattttgacatacaagttgtaaaaaacaacatatttgtttgtttattttgttataagttttgtaggtcgaatttaaacattcatttttgcgaagtgatatatcacaatatctatcatgttaaattttttataattatttgaatggcgcacaaaaaatgaaggggtctaaggatgaaaatacttctctcatctatatgtaaatttagcacctccagttatcttagtacttcctagtaccttctccaaaattgtaaaatccattcatgtattacatacataaacacatgcacccaccagcatatagaggtccacggcgggttgatccgttggtattagaccgcagttcattcaagggaattctattcgatgcgcgtgagagagatggacaagtcatacacaatgacctcctactatctcccccctctccaccttatctattcctctctctttctcaaccttagtgcacgcaagcggagcggagcaagcgatggcgacgatgacaactctcctgcgagccctttcttcctccttctggtgaattgcccctcttcctccaccgccacctcccccaccccacgtgcacacaatgtcatcgtctcgaccacgctggtgccgaaagtcatcaatgtgctagcatgaccctggctagccggcctcatccccccctcccccaccccgaacctttgcctgctgctgaccccgccttatccattgcccaccgctggtccgccacctcataggtcatccctctaaccccaactccccactctccctccccatagccaccccccacacccgaccctcgaaaccctaacccagcgcgtacgatttcgtctgctagtgtgtatacgtgaattagcattcctggtttgttcaattcgatggcatttagttcctgcttttgagtggtacaatgggccactcgaatccctccaaaatggtggtctttgcgcccttgcttctccacgcacacaaccggcctagtgatcagagacatcatgactctcaagtctcaacaccactgatctctttctctctgtcatgagaataatgatgataatttggcccttcggcccagattactacctttttcgatcatgcatgaagccaggttgggatcaagctgagaacgcgaccgcgatgtgttgtttcggcaaacgcgtgcgctgatcagcacgagcttcagtatacgcatgcatgtgtgttctcctgtacacatcgatgattcgattctgcgcgcgggctcgtgtcgttgtgacacgatacaatacatcaatacggctggatgcgttgcacgatcgatcgagtcgccgcgcggttcgccatgtacaggtccccggcaacaaggcacgcggcgatcgatggttgaaacccctgccgaacccgtaaactttttctcccgtggaggaccagcacgcggttaagcacaaaccctgaactgacgcggtgccgcgcgcggcatgcagtgcagagtggcaacaggctttcggcgcgcgcgctcacaccccggcccttagccccgtatcgctgccgcctgatcagaccgacgcggagagaggaaaaccgcatcatttccgcgaggaaacgagcccgtgcggtgcgcatgtgcccgcgcgcgtggatgtgtgtcatctcggcacctgcacctgcttctcgtttcgtttcgatccgattccgagtcaaattaaatgacatggacgatcgaatctgctgctcgatcggccagataccaggtctctctctcggaggtgtgtacctgtgattctcttttgacgtgcacgcaccgaccgggaatacgggttggaaattaatgttgcttgtactactacgtagcagacacgtgagcagttgcacacatacgcacacacaagtagtaggtcgctctgctggggcagattcatttggtgatgtgtacattgggcctattcttcgtagacaggatagatatccttatttctttgacataaaaaatgagaagatggattaatatatgatatattattttataaccaacaatttagagtttactttcacatgttgtaagaaaaataaactctaactcctacacagcatgtatttagagccatgttagaaaaccttttttacaatcgtagaggttaaatttgaatttacatgcctatgtataatgatatatcacgtattaatgtatctttttattttttaaaaaatataattgtttaaatgacatgtaagaaatggaaacaccccctctagagacaaaagacttttccctttcgtactctacttgcgaataatttattttttaccgggatgacccaagaagaggacattcaaatattattgagtttgagggggaaaaagttaccaaaaacactattgtcaacagaaggctttcaagatttgttgtatactgaagcacacatgaccaataaccacagctaaccatacaaacacatatcactaagaatggcttagcaccaaaccggcaccgtagtgcatggccaattgtcatcgggcctacaataacaccaatgatgaaaaagtggaaacccgagtccccacctccagttgctcagggcaccaagggcctccaagatcgctcaacagtatcaaccgcgagtggagccaaggacctggcccccatggtttggctagttgcgccccgtgctcaggacgcatgcgaagagcaggccccgaacacagaggttccccaagcacgaagcagagcttgagcacggagcatgccctgagcttgaccatccatgggctgctcaaggacttagggtgccattaatatgactggacttgactcatcattcctgcacatcgtctgcccgatcttgcattattaatcaatgcgccgaatacaaatccggcggtcgcacgtggcaggtgacgggcgacatatcatcactcctaaaaatccgggggtgtggactgttaggagacgtgggtccttaacccatcgattggctagccataccatgacttggcgcgcatgtctatcaaagcgagaagtgagcttggtaggtgtcatccacagtctcgtcaccaaactcgggccatgcatggcatgtcatgtcatccacagcatcggcgctgagggtgcagtgagctagaaggcaattgtccactatcatgccagctcctccgacgggacactgaaaatagaaggccccacctgtcagcacgtgatacgactaaccctacctaactcctgtgtatatgggactcacttgtaagtgactagcaattgtggattagactataaagggaggaccaagatcacagaagtaggggatcaaaccaaagtagccctagtttgctaagtctctttcctttaagatttgaaccccaagcaacgaaataaattcaatagggcaaagtgagtgtagctcaactggtttggttccttgtggtggaaccaacccacccaggttcaaatcatagatttgacatgggtgctcgcttttacggctaattattctttcagtggtaggcgacgtacccgtcgacagcgaggcgcctgtggtgacttcgtcaatctcaagacatgccgacccagttttccggaggtgctcataggggtagggtgtgtgtgcgcgttgtgagcacctgcgtttgtactgtgtttctaaaaaaacaaactcaataggagtagggtgttacgcctctgagcggctcaaacctgtataatcattttgcctcactttgtctcgcgcggcccaaatttagcatccgccatttgctccttggccaaatccaaaagggggggctacatgactccctgctattggagtttaggttcagacaaccacagagccgagtcttcaaaatgatgcttccacggaggttgtgatgctaaggacgtcgttgtcacccgtctaagaaacttagatgtggtttttacccgaagattctcgtcaagaaaggtgaggaaggagatacctcgatagcatctccagaggggttataacacccgagggtatattcactgtcgtcctagtgaatggctgggctaggctttcgcctagaaccgctgtaaccctatctacatatggtttgtcacccaccatcttagttaccaccatccaaacgttggctgcacgcggcctatgccacatcggaccaacgtctctctgtcggcccacttttaatcctgtcaccagcaggacctccactgcacctcgtcgccaaaattaaccctctatcccgctgcaaattccccacgtgttggctgaggcctcctccgtcctgctgtccaccagcctccttaccgaacttgcccaaggataacccggaactgggcgcgtggtgtcatcttgacagctcaagtctttcatagctgatcaatcgtcacctccacggtgcttcaccttgcttatagagctccctgcataggaggagaggagctccacaagctagttcatttgcttcacaaaaataactcggagtgcgtgcacggattatatcaaagtttatttttgaggggattatatcaacgtttaggtggaaaattattggaacatggtttgagtgagctgggtgctcaatgacctagagtggcaagtttgcagcaagtgatcacgcagctttgtagcatctcaactcacagacacgcacaccttacttcaactgattaccacaagaatgaaaagtaagtacatctttaagtgtaaaaaagaagctttctgcttagctaaatagttcgagcccagctagctagctagagctagtttgctacagtaaattggcccatgctggactaatgtaaatgcacacggccagctaatatcatttctctagttctgtacatatcgacatcacgagacatgaacatttgttgtgtatagttactggtagctgaggtaggacaatgggcccagctctttcaacgttgtagggttggtaagactcaaaaaatcgatcgattatttgaggcaaacggtatcactaccagagatcagctgaggaggagacggcagaaatctaacgctcgccagagattcctcgccatgatgatgcctttcgtgccatcgatggctcccggcgacgaacggaggcgaccagatctcttgcgatctttcgcgactgcacacatgtcaaatccaccataagatggcacacgacagagagcaccactaccggccggccggccggctttctttgatccccataggggagagaattttaaaattttaagattgttttgtttctttgaaattttatcgaagcttgtttggacattgtaagcaaaaattattcagcctcattagacattatgcatatttggatatcgttgtttgacggaggttacatcgtgaattttgcctgtactgtagggcatatgagtgccaaagaagtgatctttttttgcttggaagtcctaaaaaaaatctcttggaaattggaatggctaacaagaatgcatggaaactgtcgtaactgttggagctattctggatcaagtcctcgtttttgcagaacatgttcccggattatctacagcgaaccgaatatccaggctaggaattagttaactgctcgtatgaggtttggttggaagaatcgtagaagcatagccggcacaaagctactagtagcgcgtttacggttaccagtgcaactataagctgcttgatcatcacttctgtgtttctttttcttccatcgagggttcagttttctttatagcgttcctcttctaactatgcattttgtttagtagaaaaacgcaacatccagacaacagatacggcttctttaagtcattttcagagtgttttttttttaacgatgagctagtattagcagctgccagctttagtgtatacgcattctgtcgctcatacattatgctacaacaattacatggatgctgggggacctgttgctttacctgcagtgtctggagtctggaccgaccaaagagtagccacccctgaagtcctgaacggctgagcccggcagcagaggcaagcaccaccacccctaggaagcacaggcacgctccagctttatgcagggtcatatgatatcatatcctgacccctgagaacagaattaagtcacatatcaagtttgttcttcgttgattagtatggtttgtccacttcctgttgttggaatcccttatcttttatcttttcgctctgcattcatttgtttgaggagagcagttcaatccagcagtagcaagcagcaaatgagcactcagaatccattcaatcaagaaaggcgtgctgtaccacaaaaatggtctgcactatataggaacaaacttcatgccccaggacaactaaggaaacaacagatttgcatcattgcggagctagcagaaacagctagcatgatttctgcacactcggagaactgaacactatcaattatgcaaatatggtacactacagaagacactcagattagctttcacaagagcctcttgtttataaaggaaaaaggaaaacctagaagcacttcatttcgtggtatgacgggcatcaaccaaactgcaacaaaacacccaacctacaaacactctgccctggcagctgatcggacacttcagttaccctacgtggcgtgctatgaccaagagacctctatcttgtaatttggagacaggttaacagagtacctaaacttgagaggaaacaagtgcatctgcgttttggaattcacactgtttgtgggcactagttgcaacccttatgcaactcaagccttgcagcacgtagccatgttatggttcagttactagctagcgggccaaaagcttgtatgatggcatgtcctcaatccgctgaatatcttcaagcaagagctccctttctagctgacgtcgtgtggacttcatgaccgtctgcaattttagtagcacaatttaagtcaagacggatgggtgatttcatcaaccattgtctgtctctgaagattttcgtacaaaaaaaagggggtcaataggggtgagggtgtgacgctactagaattgggatagaaagacaacgtacattgaagtccatgtaagtggcatgcatgtcaagccattgctgatccatcaacttgaaggttatgcagtagagaatgtcaaaagcctgatcattttctggaccaaaaattggtgaaatcaattttaggaacactatactgaaatagattttaggagcactataatttggaatcaattttagtagcactataatatgaaacaaatattcagggaattattactaaatccttcaccaatctaatatatgttgtctgtttcaagaagtatgactagtgtggtataccttagaccattaaagtgaatttagcaaacgtagactatcaatagtcataacacaatagtcatctatttgcaaaatcaatagagctggtttatataacaaaaatatactgaaacacaaattcttgtagctgcaacatctgtacaatcatacaccctaaagcctgatcacaggtcactaatggagtgcaaaggaacaaatgcatgactcagtttaggttcaaaaaagaaacaaacaataagcatctcctgtagatcctaagggattatgaaacataggctttaccagaaagtagctttagaaaaactgctccgatgaacgaccttggtttaactgcagaggaaatcgaagtgaagtgtcaattcaacatgaatttctagcacgtttcaacaactctgcaggaactagtattgtctaataaatagatccaatcatccaatagctgataagcaaagaacttttggtcaacaaacctgattgaagatcaagcatctggatgagcatgaatgttatatttacaccagccacagcaaatggatactcccaaattgcacggtcaccattctgcttccgaagaagttcctgaaaagatttctgcatggaaaggtaaattggttaatggggtaactctgagtagtaataaacctgaaggtatgaataacatttaatatcacccgatatatactactctctccatcccaaaataaatgaccactttggattcaaaatttgtcccaaattaagtgatcactttggagtaccacttatgtcattaattacttctaattcaaatttcttcccattttacccccaactaccctctcacgcacatacatccctcaattaataaggggcatctaagtcatttacctcccctcataatttagacaataagtggtaaggtggttacttattttgggtcagaggaagtatttaacagaaccattttcagcactctgttttgtcggatgtactgtggattatttatgtttggccaaccagatgcatgaaacggtcctcatttctttttcatagtaaggagattctgtacagccagaaatggtgaaaattaatttcaggtaagcattaaatgctctataaccagaaacggatctagtagattatagctgttatactgaaacataagtactggggtacataagaatctcaactcgttagtcatcatcagtgctggtacaagtatctttggaatcaaggattcaaacttactgggaagttcttggagaagtacactaagttctccaaggagatgaagcctccacctctgtaatgacaatacatttcttcttatctattttagccacgaaatactgacaaaagggtggaatgaaggagaaaagccaatacctaaaatctgtagatggatctttcccttgccagcccatctctttccattgttctgatattagtccccgaagctcagctccaggaaaagaagcacgccagaggtccttcaatgcttcctgattgaagaaatgtgaggtgtcacatcgagtagctattccaacatttttcaagtgtcatctccaagaagaaatgaacaatactggagaatcacacatgatctggagttctgtattgccatgcataacttcacaaaagagttaaggatttagttctccagggataagccacactgagaataagaggcctaaataaaaaatacaaaataaacgaccaaagttgttgcattgtaacctcaaaagactgtctacatcctgaaaatctattgcctctacaaatatctgaaatcaaatatattcagttactaacatctaatatttcctcataaattccacatatgtacggaccttttttttaatcatactttttcagttgaatcaattctggttattcaactttagagaatgtttccaactcatatcttgttctggacgttaatataaagttgtggcacccccgcttcatcaaaagagaaaaatatggaacatcaaaagtcctatgtaccaacagttaggtgtcgtgtatcagccaaaaacaagtacctgatgatcactgtttgaactatcatactgaacttctaaccggttctgtaacctctgtaggcactcttcctgggacagaaaatgaaaattgttacttccactgttccactttttttttcaactaacacatgcaaaaactcattatcttgtggcgcacatgtatggtacggaacagtaaactaatatttggaatacttatgttaaaaatagaattgaagccatttaagcgagcatggaaaatgtaggcaggacatgcctgataaaacgcgagaatcagagtaaggatagtaattcggagatgaattcggcgatgaccagaagcaactttcaaaatttgtgaacagaacccagaactcaacacagtattattagcaccatggaagcagaactgtggggatcaaatcacacagaagggaaaagccatcatcacctgaactggcgtcaaatcgaaggagaggcgcgcgtcgctgtccctcctctgggcgcacacgcaagacagccccttcccgatccacgccgtcgaccccgtcacgacctccgctgcaccgacgagcgcgcgcgaagcagcaacagcagcagcagcagcacaaaaccatggtgagcttccgcgctaccacgagccacaattcgggcatggagacagccaaatcggagaagggaggtagtagtagtagtagagtacccgaagacgagtggtggaaggcggccgctcccgcggcgcgctcggagccggcgagccggcggacggcgacgaatgagcccgcgttcgcgtccatctacctccccccacaagctccttgctcgagcaggacgcctctcctcccggaacccgcttccccctcccctcccctcctccctccctactcgccgcgatccgcgcgactgcggggatccatggggacggatggacggcggcgctccacccacggcgagatcgcacgggcggatcccaaggacgcaggaaaggaaaggaaaaaagagagagaaagagatagcccccctcctgattaggcaagcgagggccgcgaggcgagcgaggcggctgcttcaacttcaagaacttcttcgcttcgctcgcgtccgtcagttggtttggctgcctctgccaccgcgcctcgcctcgcctcgtctcgcctttcggtttggtgcgaataaatgaacagcgcgagttgctgctgctgctgcttgcttcgcttcgattcgccgctccctctcctctcccctcttcttttctttttttttttttcttttgttcgatttggggcatatgcgttttaattgagaggatggaatttctgtacagagatgcagatctgcatgatttcgtcctgatgtggcagattaagggcgggtacttttgagctgttaggtgtggaggctgtgcatagacaatacaagtactactaatatattgtcgactgcatcttggaaagggcaagtacaagttttctcaacatgggctatttttattgctagtttaagtctatttttgcacttaaattttacctgaagtccattttccaacctgaagtacaaaactggttgttttgcaccttaacttcgtaactggataggtagcatcttgcaccattttctttaatgttttgtttgaaattaaggtgttctttttctaggttatactctaattttgttatacatgcttttgttgatgatgtagatgtcatttagtacatgattgaagttcatagttccactatcatcatcacaagttcagaaactaccatgtaagatggtttagggtgctattttttccggtttttaaagttgaaggtgaaaataaccggtttttaagctcaatgtgacaaatagattcgagcacagtcgaaggtttacccaggcatcttgtaccttttccctgttcatggattgatatattaaagatacaaatggctagtgtgtcgttattaatgtattgtccccaattcataggtcgtctacttcaaccacccaaggatctccttgtaattaaatcggcgggaaaaagacggtaccattcgatcgatttgagctgtcattttctgaatctgctaataaagatcttttttttcctacgtgtgtacctcttcagcttactcagctgtcgccattgcatcatgctagctttgaggttacagtttggtttcgaattccattattcaatatttggttcagtggatctgcaccgaacgaaaacgcgaatcatatgctcgctgtgtcgcgcccgcgcgctgcccactgtcctccaaccccatccaccttttcttcatcggaaaggcagctctggtcgccgaacaaacacctcgatcgattctcagcaaccggcatcgctcatctactctggtctcttgctttgaatccgtgcttcgtggccatctttacccccgtggtggattggattttggatggtacgtgacgaactgctgtaatctacaacgcacgtaaacaacggatcatgtcctaccattgcagcgatgccaactccacaaatggttacagtaacatgatcagcgttcgaggttatcgtaagcattgattgaaagctggaaaaaacgggtacagagaagagaaagaaaagtgtacagttacaggcttacagctcagagaacaggggtcgcggcatgtgatgtggtgagacgtcccagtccacggttaggcgcgacccggtgggaaaaagagggcggtcgctcgggtagtcgggtcgatcggccgcggccggcgggcgggcgggcgggcgcgtggggcaaaacatggcccgacaccgcctcgctgggctcggcctgcctccgctttccgcggccgcgtcttttctcccccggggagaggagaaaaaaagacggccagaaaacgatggatttccgcggttcggacgggcggcgtcgcgtgcgcgccgtggcgacgcgcgggtgggcggctctctcccgtcccgtgcgaggtgggagtgggacaccaaaccggttgctggtgtggtggtgttggagtggagtggattgggtttggatggggggatgcgcaccccggcgctgtgtgcgctgcacctgccgccacggtggtcgggagtggatgtgatgtgtgtgttgttggcccggtgcatggtgggtgtagcacgtacgtagtcggtgtcggggtcatctgggacgtctcaggaagtcaggatagcgttttgtggtttggaacggaatataactagaagagctgtagctcgcgtctcgcgataagtagaagggttagtgtccgtgctgaattcgcgtcaatctgtgttagtgctggccggcccatgcttggatggacgtttatgtccgtgtttgtttaacttggctagtttttttttaatcttttaaattgttaattaatctgctgacatggcaaaataacactacctcaccggtctggctagtgtgacaatgttatttggccacaccggtctaattagcgttgcgggataaaacaaattttataagggtttaaaattataaaattttaaaaatgttgtggcatgatagggttcaaattttaaaaataaattatataagggtttatctaacattaaaaattaaaagggttttgaaaataattagaaaattcagttttttgggtactggtacagccatttttgttcaaaaaaagaacattggatgacgatcatgtaaacttagcaaagaaagctggaaaacatgatggctcatcataatttggaccacaatcaacgtatatacctcaacagatgatgcttgcttgtgcgttgttgattgctagcttagcaccacgcttatggacttttggttttggttcgatcgtttaggtgtgatatacaacaactcaggtacttcccttttccaaaagggaaaacaataactcaagtacgtagcttgagcatgcgaggactattgcctttaagtatagtttaatggtgactttagaactttaaacaatgatcatgcataggtagcgtgggtgtgatataagttcatcaaaaggggcgccgtcaaatattaataacgagcttgttaaagttctcctacttaatcctcatatgatggtctcctaccgtcctacgtaggatctaataatgttgatttaccctttctgtgatgcccttttcactaacgaacccaaatcaacatgcagggcaattaagcaccgtcacctaatcaatcaagtcgtatctataaacttcttgtgccattctcaacaatgaacacatctttttcagataacaacactaaattatcttgtactactagaacaattgagcaaatcctctttcagatatctacacctttcacttccctctgctctggagcagagagcctccggtccggtatacttcgcacgtgtatcctcatataacaaagtaaagaaagtaccgtctgatcttttaactgattgttgtcactgccctaatggctaacgcctaagtcctaacgctccgattttaccggagaatcatgtgaaattgtgcgcctaaaacctttaatttactacttgatcagcgacagcatgaaacatcaaagttgtaacatggcattactactattaatctgcagagactttggtcacatatgctgaccacctagatctcggtaggggttcgtgctccaaaagattcttggcctaaaatccgtgacaaggccggcgtaaattattgctcccggctgagtcatcaagggcataggaatgtggcgcgatgcacatgcgatgcgaggcaaatgctaggcgtggccgctcgccgtgcaagcaagtgtacataagctgtgtttagatttaaagtttatattcaaacttttaatttttcctatcacattaacctgtcatacacacgtaaactttcaatcatatcgtttcaattttcaaccaacttctaacttcaccgtaaactaaacaccataggcaaccttaccttctttccatgcgtgccaccgacgtgtcgaggacataggcataggcatggcagagtgtaatcaacagcggatatggatagatatcaatcacatcacaaccagagagcggcttacattttcagatttcgggtcacatggcgcggcatgcttcttctgaatatgatgatccttgtcgtactgcgtggcagtcgtcgtggtcatccgagagatgatgcactggaagcacacagaagaagaagaagaagaagaaaagctcggtggagctcggtgaagacttgagagtagcgatgagctcgcgccttgcgccctggtgatcgtacgtgtttgactctaaaaatctagatgatttgattattcccgtgcgtgcgcgcgtgcgttcgtgcggccgcggcacggtcaggttactgacgtactcactcaggtgttcggcctttggcagtttcgcggcttcgtcctctcctttctccggttcctgaatggcggatgctgcttgcattgtgcgtagggatggcaacggggtgggacgggaccgagttgggcaagaacggccccggccccgctccccgcatttgccccccgccccgcattgcttgtcgggtgaagaaccccacccgccctaggccctgcaagggactcgccaggtgagcggggagccggggacccacagcatcaggctagggacaggtgtggacggtgagtcggtgacgatggagttgggactggccaccgacgccagctaggtgccggctaggggagacgatggcgggctggccaccggcgctagcgatggacgacgacaatgcaacaccagctaggagcggcagtggctaggatggtgtcggcttggggaggcgaaggcaggccaccgacactggctagcggcggcgatggatgggacgacgacggctgccgtcaagtcactgctgggcgacacctgggagaggaccgacgaggagacgagacagcatggcgcaaacgacgaagcatcagggcggcatggtggcttagcggcggctgctagtgttgagcctgggaaagggttgtggagcgagggcgtgacctgggaaaggtgtttggcggatcacggcctcatgctggtggcgacgttggcggcggcgcggcgcacggcctcttgctgagagataatttggggatcgatcaaatcatctggctgctcgtgacttcatctacggttttctttgttgtacgcatccatcgaattgggctgcaactgagctagatgtggccttctttatgaagggcttggtgtccaccgaaaggaataagttcactttgactctcttaactagtggccgaatctgattcgtatccctgaaccacaatactgggtatctcaacacccctaactattaaaatcgctgtaatttgacttcctcggtggttttgaagaacggttttgttgacgtggcgtctatgtggcgttgttgacctggtatctgttccacgtgacgctgacgtggcgcttaggtgtcattcaaacaaacatatatgtgcgggacccatttgtcattcagacaaaaaaaaaatttatggggcctacatatcatctctctccatttcttcctcctctctctccccccttctcttcggtctttacattggcccgtatgcggggagcgggcgccgaatcggcggcggcggcgggcgctggagcggcagcggcgtgtgagaggaggcggagcgagagggcggggactggggatgaggagcgtgcgggagttatagggaattgctaaaaaagtatcgtaagctttttcagtagaaaactttcgaatgcaactataggaatgacatcaagattgaaaattttagatccgtgccagaaagttttagatattcatacttgtgttgggttcacagttcgttcgagagagattatgaggttttaattcagagattatgagcttggagacgagacgacgcgaagctttttgcgtcatcgtcgctcggcgagctggaacgtgcgcttcagaaactggctggcgacctcgtcgtcgcggtggcagagcacgcggaggatcgtgttcgggtcggcggcgtcccaccgcctcgatgtcggcggcaccggcgccacgccgccgtagccgccgttgccgtcgtcaccgtgccccaccaacgtcctgctcgacaaggacggcgccgcctgtgtcgccaacttcaacctggcactccttagcccgcgcacgccactgcccgcctcggaggctacatggcgccggagcaggaggacaacaagcggctgtcacagcctcacaggaggccgacgtgtacagacgatacgctcaccggcaaggtgccggcgcagtacctgcagtcgtcgccggtcgctgcctcctcctgcacgccgccgcccctccagcccccgccgcctattcggcgcccgctccctgcatacgggccaacgtgaagaccgaagagaaagggagagagaggaggaaggaaacgagagagatggcatatgggcccacatgtcaatgggtcccacaaatatatttttatttgaatgccacctaagcgccacgtcaacactacaaagaacaaatacttcggtcaacaacgccacataggcgtcacgttagcaaaaccatcctccaaaaccatcgagagagtcaaattgcaccggttttaatagttgagggtgtcgagatatccggtattgtggtttagagatacgaatcagattcggccattagttaagggagtcaaagtgaacttattccccaccgaaactaagctacctccagattatttgttttaatgggccaccttctatgcattgtgtactttaggggcccacgagtaaccagcgggtaatttttcaaccccgctcccacccctgaaaatgagcggggccccgccccgccgcacccgcgggttagaatttccacctaccaccgcccctataggggtgggtccccggccccacaagggaaatcgccacccctagttgcacgcttgggccttcaacaagctgggcatctagcctgaagtctagaaaagtggacattggggacctgtttagattgtagtcaaaataaaccttatcaaattttggcaatgctaaaattttagcaagatagcaatattgacaaaatggcagaatttcttatgtactgagcaaatttggcaacaaactaaacatatatatttttctggcaactttaccaaaaaagatatggttagaaataacattaaagtgaacaagtcttaggttttttgggagaagcagagaacccaatacgctgttttttctttcagttcatcagtacattttttaacttttttttctcctacccaaatgattcacaatccagcccacatgttagtgagcagtactactacagaggaccctcaatgattcatcggtttcaaaaataaaaaggcgattctcagatgcaagcggagatgacttgcagaggcatacctgataccatcaccaccgaagcagagaatagaatgtgacgtagatcgaagatttccaagcattccagctcttttgccatgtgaaaaattaggggtgagtatagagctagatattgagctgtttcccctttgatttatttaaaaggttttttttttcgtactataaagttaggattgatgctgcgatcatgaaacatcctaaaagcgctaacttgacgtccttttagatttccaaccggtaaaagcatacagcttcttcctgatatatatgccaaactaattatacagagagattacataggaggaacagataaaaaactaaggaacgtgggggtgaaacattgcgacccttttatgattttgacgcatattaactacaatggaaagaacaaaagaataattgtggagactaaagtagaattttccatatgttttttttctccccagagcagctcactcgactcttaacctagctaagcttgtttgactgatattgacctgtgcgcatcacattttttagcattaagctgaacactatatctcttgattgcgaccatggcatttaagcagcaggctgcggggaagagaagattaggctcatcagaagcccaaccaagagacctatgagcccaacaaaagcagcaaacgttaaggagaaacccgtatcgcttttgcggcttctacgcctcctaatcacatcctgaaaaatatataatgcaaattatatgtggagaaattcaatataagggagcaaaggggtatacaaacgaatcatcttgaaaacttactaacgaggatattccacattcatgaaatgctagtagcaatgggatttttatgcacatttgtcattcccactttcatacttttttagacaaatcaaatcgacaactactcattttgaactgtaaaatagtaggactagaatatggttttcttttatttccttgacaacatttgtttccacaacccatcagaagaaataaataccaagcaaacaaactttgcatttttaatgaagaactgatcgatcacaattatagaaatataaataattgctatccacccagggcgaagaatttcttttgcattttgctcaaagccagatatttttaatcgaaactaattattttttctccatactatacattttttatgacgggttcaaacaataaaacggcagtataaggttcacagttcagatgttaatatcattgagtaacataagggctacggtgaaataaagtggtgagcataaaacaaaatgaattgcaaaaaaataaggctgaccaattcacgttgcatttgctgattttgctgcagcatgttatctctttcatctttcaagcgttgtattgtctgtatctgaatagaagaaaatgaggtgctaattaagaaaaaaacgataacagaacatatcacaaagatgtttctttgttcaggcaaatttagttaaaattgtatagaattaccatcagctagggcacatttaatgaggcaaactctttaggaaaccaaaaaaattatccaaattctttatttggattttggaatatgtcagtcaagataaagaaaactattactttcataatggacgaaaggacaatggattctaagggtgtgtttaaggagaaggggattgaggagattggggagatacgcaaaacgagatgagccattagctcatgattaattgagtattaactattttaatatttaaaaatggattaatataattttttaaagcaactttcctatagaaattttttgcaaaaaaagcaccgtttagtagtttgaaaaacgtgcacgcggaaaacgagaatcaatctcccctatcttcccataacgaacagagcctacgttctggtcccagtgcactgttaagaaatgcaaaggcaacctgctcataggcctctagggcctcacttctgtggttctaccctcaattatggatagtttttctcaagttcaactttatgatcatttcaaccatcttatatcgttgcttcatttttctatactattttaaatgttggtagtgctggtggcgacataccactcttatcactgacatgtgaactcctctttggcagtgaaaaatttaaacctccttgcctcttgctatcagagctgagagatagagagatttgggctaactatcatagagcctttttttttccaaccgtaggtagatagactgatcttttcttttccaaacttgggtctttggagtgatgagaatgattaaaataatcaatcgtcacacccacgataaagtcacagtgattattatttttacatacatctaattaatactcatatactctatatttaattaaaaattacaacgataagcaatataatttttccacaacatttgatttttcttttaatcctgtaacaaagtactggcattctgctagttttccaaattccaacacttacactttcagatgatcatgtttttctcattaaaaaggcgtttataactgtagaggaacataaggtaacattacaaagcaatgaatcatggtaatgcccaaaatagcatgataatttcttgccagaattagggatgaaaaaggctcagaacagacggaaaccaccctatgtagttttcatttcaatgtttttttttaaataataaattaaaattggaaaccccaaatatgaaaataaaatcgaatgcgaacatagagaatatgataacggatatttatcggagtataaaacccccctcaaattaaacttctgaaatcaatgaaaaggtgtagctcattattttttctaaaacaacaaatcgacatttctaactttttatcaattaacaataacacgactagttgtaaagagaacaagaactatatttatctaatatggcatggcctaacaaaaacaaaacaaaacaaatctaaagcaccggactaaaaaaatatatctccattgaactaacgacctcaatattcattaaaatctgaatatcttagagtagagaaggctgaaacaaatcaacagcatataaaaatattccgtttctgatctcgaaaaaaaaatctaaatttgtttccaggaataaattcgtctccgaaaagtttccgaccgattctggtttccgacggacagtagcctttgcatattcgattctgtttccgagaaaaaaaaaatccaaatttgtttttgtttctgaaaatttccgaaaaaaattccgatcgacgttttctatttccgaaaacatgtccggaaatcagaaattttccttcaatggagagatatttattgtgatattatttaggtgtagttccctgataaaatgagagatgcctttaggatcagttgcattacctcttcaatgcttgcattcttcagcatctgcatgtagtacagtgcaaaacatgagtcctttgcacataagtttggtcagcgtcatacaagtttccaacatagtactctcaccgtgaaatcgtcagacaacgatttgaagctcctgcttcctaaagatgtaataccagagtcgtcggaacttccactaggcactgtataaacaaccttaagctttatttcctcaatcaccttatcaacttccttgttgaactggacacacaaaaatggcatatagtttgtaggttagaagtcatgtcattttaacaataatgcatcactaaagcttgaaaatcatatatttgcattttatgctcaccgtatcaggaggaatctcgtccatgtcagtactggcagctaccctagtgctctgaatcaagaacttatccttgcattgcatatcttgtgggtactctttctgcgcctggagcgtaactacaccaacaaacaagaatgcagatatccaaatatcaagacgaaacaagaagcctaaagagaaccactgcttggcatactagaaaatggcaaaactggaaacatgtatttacttgttattgtgcaagaattggaaacatgtatttacttgttattgtgcaagaatcccatggctggacgatgttcgcgttcggccggacgaaatacttccttggtgatgttgttttgacctgaatggaaaaagaacaaatttgcatcaaatcttcttgccaggtttcagaaaatctgggaggtttctgtcaagaaatattgtaacatttttttgggcgcaagagatttgtgcatcattttattaagagagagtaaagtttcctggttacaaccaaagagaaaagaaagacaaaaaagatgaggagctaagaggaaaataaaaggactacaactcaagttctattctcacaaccgatgtggctacgagcagagctgcagaacctcctttttggcaagactatcgggtgtggctaatgggcgatcgatccccatccccccatacactcctctccccccttcctcctccccttcttctcttcctactacatcataatttttttttaaaaaaataaagttggaaaaatttatgtatagaaatactatatataaaaaatatttgaattcaaattcaaatttgaaacaggtatgtaaacttttaacttataaacttttggtctataaactaatatttgaattcaaattcaaatttgaatcgggtatgtaaacttttgacttataaattttgggtctataaactttagatgtatagaaatactatatataaaaaatatttgaattcaaattcaaatttgaatcaaatataattcaaattcaaatttgaattgggtatataaacttttgacttataaacttttggtctataaactttaggtgtataaactttaaatgtatataaatactatattaaaaaatatttgaatttaaattcaaatttgaatcggatatataaacttttgatttataaattttgggtctctaaactttagatgtgtaaacttgagatgtacaaagtttaggtgcataaatttactaaaataggaaagtaatgcggtgccaaaaaaaggaaaccacgtggagaagaggggggcgatcgatcaagaatcctaatgagcgatcgctcgcgtcacggagtggagagcgatcggtcctcatcacggggtggtgggcctctctccccacgttgctttctttttttccgcaccgcattacttttctgttttagtaagtttatacatcttaagtttactcatctaaagtttatacatctaaagtttgtattgttaaagtttatacacataaattttatataccctatttgaatttgaattcaaatttaaatatcttaagtttactcatctaaagtttatacttctaaaatttgtattgttaaagttttcctggtcaaaaaaaattgtattgttaaagtttatacacataaagtttatacggtgaaagtttatatacccgatttaaatttgaattcaaatttaaatatattttgtataaaatatttatatacatatagtctatatgtacaaagttagcaatgtatatgtttatatatataaagtgtatgtacatgaatatattttagtgtaatatatttatttattctctttctttttttcacacttattttcaaattgattttaaatttatgaagaacccacatcgtatgcagacagtcacgagtgaggttgagaaaagaaaaaacgtgtagtactccttgatctgatcgcgtgaagtgacccctagtgactaattgcgtattagacggatctgcgatcgatcgcccattagaagcttcgtctttttgacaagactatcgcgcgacctaatcagcgaccacaactacaactacaggtattccaaaatagtatggatcccaagtacatcttgagggctcctttgcagctcgggatcccggacaaatcctaggaagctggtccacggggaaaatttccacgggtcaattttgttagctccatttgtaagctcacaggacggggattttccggcccaatcacagggatcccaaggaaaagtatcctgaatgtccgtgatcctgcaatggagcatagaatttaactatctgtcactttaccttacatatagctattctttaaatgtcttcctaatgtatataatttttcttaccactataacaggcacaacgggtgaatcaaattgagtaggtacatcgggaaatgtgttctaaaaataatagactaaaatatatggccaatccttaaacttgatagtgggtgtcacttagttccgtaaacttaaaacttgcacatttaggtctaccatcttgatttaatgaaccatagtcggtccaaaccttgtttgacaggagctgaccgccgacgtggcattccacgtagacaatacatttatagctaacctattacagcagcgaagagtgatggaagaattgcaatttgccccttcatgctatagtaccatcccgaaacccacaaaatcccatttcgccttcgtcatcgctatttcgtacttcaccgtcgccaaccctccctcattactataccccgtacttcaccatctcagtcgctaatccaagccattgggagaaggcgagggattttgtgggtttcagggtgtccctgtagcgggaaggggcaaaatataattcttccaccactcttcgctataaagggggctagttataaatgtgttatctacgtggaatgccatgttggcggtcagcttcagtcaaacgaggtttggactggctatgatttattaaaccaagatggtgaacctagatgtgtaattttagtttatggatgtaaatgacacacactcttaagtttgtatattactcgtaaaagtaaatccggtagatagtggtatttggagagtagctatcagtatgagtagcaaaaatagttaaatccccatggagtcccccgcagcagcaggacgcgaggacgaggtggccgctgcggccgcaacggccgccgccgccgccggctaggcggccggcgttgggtggaggcgcaacgaccagggcatcccgcgaggggccctccacccccaggaaccgcattgcccgacctggccggctccgccgccgccgcagcctcatcgacctcgggcgccgccggactccctctccaaccgcgctccagtgaggacatcgttcgagaatcgagagtaccgcgggcccgaggaggaagaaccttcgttcgacatgggagaagtcgagaagaggggggaaggagaggaggaggaggcaggtgggaggtgtggccgccggggaccggagtggtcgccggcgcacggcgctctcgtctctcagctctcagcggtgagttcgcgagtttcgatagataccttgaatgcaacatgatgctcgctgttgttcaccaccttgagattgcaatagcacggtttgtccagctcaactgcacgcgagaattcaacggagagaagaaaccacggatggttaaggctaaattaaccgctcgtaaatgttgttaggataatctcaagaactcctctgaacttacataggaaagtgaggtcctcggggtagatggagatcagcgttccgccgccacccattgccacacctgatcaaacaaattgaactgaaaggacgcccaaatatgcataattcgctgcattacagaagagatgatattacctttcccttcgttgtcttcgttcagagtaaaatccggcctttctttccaggaactgaattgaactgaaagaaatttgcatgaggaattggaagagcaggagctaggagcgaaggaagagaaagagagagaaacgaatgggtttgggtttgccttttcttggcttctcggcgacaatgacggggcagcactcacttcttgggcccgtggcagttgccttttcccccatttttttcgagtgaacagcaaagctcttttttttatttaattggtggttgatgatttatgttactatttactattcggtgcatcttttccaagaatagaaactcatggcacttggaagttactctctcatcgttttgctagtaattttcatgagcatgcttagtctggatgccattgaatactcaaatgcgataacatataagcattttctgttcaccctgtttagtctaaatcataaccaaaaaatcggttttcaacagagcaatgagatcatgctgtgccattcaatttctttttcctaaaatgattcaattctgacataaagtgcaaactgaaaggaacacataagaaaaaaaaaaggatctgaggaatattcttgtctgctcagggtgtttacccgttaaacaaacattagccattttgctctatattttcctcaatgaatcattggagcatcctagcaaaaaagaatggaaaatagttggtgtctatgtaactgttctctactgatggaagtagctctacagtttttaaatacctggcagatgaggttccaatcattttgcccactatgagacatggaataacctacaaagcaaaaaggttatgaagagtgtcactcaattgttgcttaaagaaactaaagccaaaacttaacttcaactggaactagtgtaatcaagtagggtacaattcaggacagactgcacaaaatgattaagtcttcagttataaaatgtcaaaccagtaaataacatcttcagcaggatgcttcagtaaagaataactgtttttttttacataagaaggtagagccagctctacttatagccatttcattgatagaaattataagttacattgttacatgagtaagggggagatgagagaacaaagaagaggaaaatggatatagaggtaagggaatgtactaaagtgaaaaaaaaaactgtagaatggcctcagcagattagttcagtaagaataactagaactttacactaaatgtaaaccattaacagcaattctcgcctttgggagtttatatttagttattaacagcatcaatttgggaaagtagtttgaattccagtggcagccgtgccaagaccaaataaacatctaatgtcgtgtagtgtaggccctggagacaacacaactcttccaacacaagagtataaatggatacggtcgatggctcatcaaaccaaccagtgctgctggaaacttcagttataatttattacccgtcaattcaactactgatccataaaaaatgcagatgtactactccacttaaccagaagttagcaactttccattcatgatagtagtgtacgtgcttattaaccatcagttagataggcagctgagaagccaaatttcaagagaaggatgtcaacaaattcataacaaaatgctagtaggaactttatacaaagcgaagaaagtacatttccacagaaagacaaaaatatatgccaaacagaaaaggtgtagatattacacatttgaaatttagtgattacagtgaaaagcataggtttgaacaaaaaaataaaaaagcatttgctagagaaagtaacaatgctagtgagagaagctcttctgccagcatatctaatttttacttgaaagttgaaaagcggggaagcttgtgcttcaaataatataactttgctcttctcactttcttgtgcctgattactttaatttccttgatcctgggtgaatatctggaatggaagataccagctgcattattaacatattatagagaacactacccgacatgttattgcagaagctgtgaatgatgccaatcatgaacgaactgttattcttgcatttttatccccagatatacaagaagcaaaacatcatctttatcgtgagcttaaatcctagcaatgtttctgtatcaggaagtaggggatctatctccttttgtgaaaggaattataacagacatccacgtggaaggataatagttgcttttttattaccaaaaatataattacatgcagcaataaggagcatattaaaatagagctttcaacttcattttgctaaaggcagttatgagcaaaaggcaaataaaagaggacacagactctgtagagctaactctgaagcttcaaataaaaaaatgaggtaatgtaattaattgaatgagacacacctagttgatagattcaatcttgctgttgctgataaagtttgaactactgaaatagcaaccttaaaaaaaaatgaaatactcctaagctgtaagacagtatgttctgacttctaagttacaggcttacagcaactataccggttctgtaaatctgcataagtgatggtagataaacttggattttgcactagaatgcttaaaacctaactcaactattaatttagtacctcaaactgaaaaataatcattaaatagtaaatcaacatataaaaaatacacaggaagttttataaatagtgaattatctataaaaacacatcaatccagcttaaagcaaatgacagaaacctggtatatcctattcctactatcagtttacatgaaggaacaaaggcacataaagctgcatgattcattattactatttatatttgaatgataagcatgtcccacatttattgtagttatatagaagtatggacatggaattttatgtttcaagatttcagtatgagttcagtgtcatcatgtgataccaggtgcaatatccacattgcatagaaaaaaaaaatgaaaccaacaactctgacttacatagggaaggtaatctcaactccgacaccagcaataatccttctgacacggattgtggtgtgaacaccagatttgtgttttgctataattatgcccttaaagagcgacaatctcctcttgttgggccgttgctgtaatagcatttgcttcatatgtcaatagctttcaaattgggagcataagaaaaacattcaagagtagcgaaaacctcaccattctaagctcaatgatgtcaccaggcctaagatctggtaaagtcttcaccttttcagcctcctcaatgaactgtttgttcagaatctacagcacaaaacaattcaagtaaaatcgtgtcacatgtaaacaagtccaaaattgccatggatgtagctgtgaaaaaaaatgaaattcttgttacgggacaaatagtgattgcacagaatctcaagaaaccaccaaatccaatcgagacacgctcatgagagcatacaagaacaacaaagaattaaaagggagtcacaaaagaatggtggctcccagaggcctctactgacttatctgccaccaaactgaagtgaacccatgttgagaaaaatcaatccccaattccgtttactaaataggttaccctttccatttacgagaaaaatcaatccccaattcagtttactaactacttcatccgtttcacaatgtaagtcattctagcatttcccacattcatattgatgttaatgaatttatatatgtctagattcattaacatcaatatgaatgtggaaaatgctagaatgacttacattgtgaaacggagggagtagatactttccatttattgagtagcagactatgtagtaactaactaattctgccataagtgttacacacaatgagttgctatttcagcacctgcactgtcaacaactcaacagaacagagaatttatgttctgcaaacaaaagaaatgctactcatatagtcatagataaattgttgcattctcccctaataaaaatatggttagctgatgtttttctcacctgcattgctccaccaccgataacccaatgtcatgagcagtttataagaagattacgcaaggaaatgctcaccccaatgatctccccgaacttaaccgggggcttgctcggcggcggaggctcatcttcttcctcctgctcttcctccgccaccgcgacagccgcctccgcctcaccctcctccacctcagcgtcagtcgaggcagcaacagcctcagcctcagcctcagcggcgggctccggttctcccgcttctgcgctggcgtccgcgcgagggaccaggcggctggcccggcgaggggaggcggtcagggagaggcggcggaatgaggaggacaccgcgaggagctgcggccgcggcggcaagcggtggcatgcgacggcgtgggggagtaacgcaccggagatggcggcggtggcggaggcggcggcggcggcggcggcggccatcggaaggtttacttacggcgggtcgacggaggagccgcgcgccggacgggggggagtgggggatgaacgctatccgcctatctttttgaggcaggagctgtgccgctgtaaagtgggtcccacctcctatccgaaggttgcgagcaatctgaaccgtagattcggtgagttgtgaaggcagagaaggctttctttttcccccatttttgcttgtaatatggaacagtagtgtttttctaatgaaaaaaaatccaaatactcccctaaattttggatggaagtttatctagcatatttaactttaaaaccggatatctaaccccctaaaattcataaaatcgttcatatttcctcttaaggtgtttttagatggtgattttgcatattttaaaagtttaaacgaacaacataaataactaatatgacatatttcaatgacatcggtagtaagtcataaatttatacttatacaatgataccatactactattatgttgatacttgtttgtaagtgagagctaataagaaaacggaaagatttaagtggagattttaatatatatttctaatgtataggtcacgtgatcaaatttattcaatttatatacaaattagatgaaaccattatacaataacacatgcttggcttaaatctgaaattatgtaatctattcgacattatcatctaataagataaatatgtatctctttatactcgactattattgatcatgctaatgctgaagtttgtctactttagaaactctggaaacttgccacacaatgcttttttttaacgactcgcacgagacggtacgaagttctattgatagagcagaaaaaaaattataagattacaaccctggagggtcgtaaccaggaaaaaggaataactataccaccacccatacatcgacagcttcaacacacaatccgggagaaggctagcaccgaatcggccgccgctaagcgtgatcgaccgctgctagaccaacaaagaaacacagacgaacatcgccctctaggggataccaaaacgacgtcttcaaaaagagaagcgacggaaaaccgttgccgccgtccgtcggggcccaaggagccaagactgggcttacgcccagcaacctgcgaatccacggctgacgcatcgatgctccaccaccactcaagctctgccgacatgtgggacccctgtaccggcgtcccccgctggccagccttcgtgcgtcgaagaccgcgctacacccaccggcagcttctcacacagaggtcgcctcatccaccgccggccgcgcctcttgtgccaagccagcctcctccaccggacgcgcctctcgcaccaatccggcctccctccatcggctgcgcctctcgcgccaagccggcctccatctccgccgcccgtgcctctcgcgccgagccggccttcgctgccatcggctgcacctctacgccaagccggtctccgatccctcctccaaacgatgccatgccggccagatgcaaccgtctgccacgccctcggctagccgtccgaagccgccatgcctccaatgaccgcagtcaccaccatcgcagccgctgctgccaaatgcccagccacctcgccatcgccatcctcacctcctccgccgcagccacgtccacggtcgccacggccatcgccgcaagccgtccgctgtcgtagcctgcagccaccagcacccgctgtcgctgcccgcgagctccatgtcgccggccgcgactccacactcccgccggtctccatgacgccctcccgctgccgcacaacgctggcctccacgacagccacacgtcgccggcctccacgacgcctgcacggcaggcctcgccgcccacgaggccgcgcgaccgcctccacgatgcctcgaccaccacggccgctgcctcgccagccagtcgccacagtcgatgccgccacagccgccgcccgtcactgccgccgtcggcagccacaaccaccgccagccagatttgactagaggcgtcgttgcctcctcctgcatcgccggcgtcaccaccggctctcgccgcacctccaccgccgcatctgtcgtccggccgcgcatccgtgctcggtaccggaggcagctccggcagcgtctcccgctaggtcgccaccgcgccaggtcgccgccgcccaaaaccaccgccaaacctcgccgccgagctgccaggacgccaccgcctgtcgctgggggaccggattcggccaccacggcaccggatccggtcggcgccgacgccatgccctgagctcgtgccgtgccgacgtcccgaccgtcttggccgcgagtgagggaaagagagccccgtcgccgccgtccttgcagccgcccggctttgccggcggcggcgaggctggggaggggaggagaaaggcggggacggcgcggcttgttcgccgcctgcgtcgcccccgggatagggcgaccgggcgaggttttccagtccttaccgacgttttcaaaagagaaaagatgccacgcaatgctgaaaacgaggagaatagagaagaaacgagacaagaaacaagacacacaaaaaaaatattacctccagcctaaaataagtgcagccgtggatatctgtgtccaacgtttgaccgtccgacttatttaaaaaatttgtgaaaagtttaaaaatatttagtcacacataaagtactattcaagttttatcatctaatagcaataaaaatattaatctaaaaaaatttcaaataagacaaacagtcaaacgttgaacgtgaatagtgcaaaactacacttattttgggacggagtgagtattcttttttaaaaaaaagttcccgcagtgaaaagtcgatcacaaacacaaactcgcataaccgccccgccgcgtgtcgtctccccgggccggctgacccgctgaccccgccacgtcctccctcctgcgcccccccccccccccccccacccccacacacacacacttcctccgcctccgccccctccccgcgaaagcctccgccacccgttaccggccgcaacccccgctccgctaccgcccatggcgaagccaccgccggcgcctcaccgcgccaaccgcgcgccgccgggcctctgcgccctgccggccatctcctacaactcccaccggggcctcgtcctgggcctcaccttcgtcgcctacgcgctctaccacgcctcccgcaagccgcccagcatcgtcaagcgcgcgctatccgaggcgtggccgcccttccacgacccggcgctcctcggcgagaccgacgtcgcgttcctcgccttctactccctcggcatgttcgtcgcgggccacctcggcgaccgcctcgacctccgcctcttcctcgccgtcggcatgatcgggagcggcaccgccgtcgcgctcttcggcgtcgggtacttcctctccctccactccctcgccttctacctcgccgcccaggtgatcgccggattgctccagtccaccggctggccctccgtcgtcgccatcgtcggcaactggttccgtgggcggaggcgcggcctcatcatggggatatggaacgcgcacacctccatcgggaacatcagcggctccctcatcgccgccgccgtgctccgctacgggtgggggtggtcgttcatcgtgccgggcctgctcatcgcgttcggtggcgttctcgtgttcttcttcctcgcgccttacccggaggaccttggcttctctccgacgacgctgcccaaggcagtgagtgaggcgagcaccgacgaggaggacagcagcagcagcgcgagcgccgccggtggcgccgggaaggaggagaggagggacgccgtggggatgtggaaggcgttcgcgattcctggcgtcatcaccttcgcgctctgcctcttcttcgcgaagctggtcgcctacacgttcttgtactggcttcctttctacctgagccagacgggtatgcacagggatttatttttcactagttcattttgattgacagtaattggccacagcgatacacattatcacactgaattgatatcacttgtctgcttgaagatttatttgtcctgtggtggattggcatttcttttttcagtactgtcaaaaacactttcttgcaatcgaattttgcttgcagactcttaccttagattatcacagtttgttgtagtacattagcaattgactatgatagggtgtgatattgtgcattttggtatatatgattagaatacaggagatagccacatgataagcaaaatgtagtgggaaattagtggtctgctggtttatcaggttgtacatatccggtgttccctgtgttctgtgtgtgggtatctagagagtatcattgttttaatacatttaattaataatagaatactgctaatatatatggcccatattgttatgttatgctatctgattgcggcaacatgtgttcttcatgtcaaatggtacattgtgttgtgcatactgcacaagaaatttgacaggacgattcgtctccaactattttggacacttccgatcatacaagaaattgtagttttactatatttttcgtatttttatcatttcagttaatcattcgatcactttgttttggcattttccagctattggaggcaaggaaatgtcagtcacgtctgctgggtatctctcagctttgtttgatgtaggtggaatcattggtggaattcttgctgggttcatatctgatcatctcaatgcaagggccaccacggcagcaatcttcatgtacttggctattccatctctttacgccttccatgcatatggcagtacttcagaagtggcaaacattggcttgatgatgatcagtggcttgtttgttaatggaccttatgctctcataacaactgcagtttctgccgatctgggaacccacaaatctcttaagggggattcccgtgcgttggccaccgtcacatcaattatagatggaacaggatcgcttggtgctgccttaggtccattcattacaggttttatttcaaaacgtggatgggattcagttttcacaatgcttatattttgtgcattagctgccggcgtcttattgtcacgtattgtgaagtctgaaattgttcatatcattcagaatcggagaaatcacacacttgacatgcataacagaactgcaggtgaggacttaaaacacactaatgttgcatctttctccattttggatatgtcaaacaatggtctgctaatgttttccttcctgttcctcatagattctggtgctcaaccacttttagaaggagacacttgaagtcgaggcagttcatatgagctggtggtgtggaatacagttttgcaatgctgccgtgattgggatatgcaacagttgattctagagaaaggcaaactagatcgagcttatgatctcagtttctacagcttggtgcttacgatcacagcaagcaacatgatcgcggtggcatttgtaggttttgtttcgtcagaggaaaatatagtcatcggttcattatccatggtgacattcttttagtatgcaaatgtgttgtagtaaccatgttcttttttcctcgtatcacggtttaggtgctagatgaacatagatatacaccaatatctgcctctcccaagtactggtcctgaaggctgtgtacataatgtttactgctattcgtatcgcggtcatcaacatcggtgaagagagatcctgatgtagcgcctctgcttatgtattaagtatttcaggttactcttttgaaaaatctctcaggtcagaactctgaagtcccgatttttctgcagttaaattgaaaatgactttgttctaaatgaaaaatgcgatgcaccaaagttttcccctgcatgcggaatactccaggttgcagctgcaccacagcagtatgacaggcggaatccgccgaagaattagaaacgtttagcagtttcagataagtgaagccagaaatacctcgtaagcctttgcagtttgcacctcagaaacagaaagcttccactaccgttcctggcctccggcgatcactaccactaacaggaggcatcggttgaggaagaagaggcgccgccggtcaggtcaggtcggccgccgcagcacacaactcaaccttaggatagcggcggtcggtgggtggaaaaagtattaagtttacattgactccctcaaatattgctttaatctaattcttatccctaaaccgtaatattggatattgtaatatcggagagtcggcggggcgcctccacatcaccgccaaggccagtgcgcctccacatcaccatcaaggccgccgacagcatagcgtacaagcacgacgctctgcgcagcgacggcgaagcagcggcggtcgtgatgggaatgcatggggtggccaccgagtcccctagagaggagagagaatgagagaagaaaggggtaggaagaagaaaatgtgacgttgacatgtggattcaacatgctgcattagctggttggaccgagtcaaagtgacacgttggtgaaaccgtcctccaaaactgctaagagtgttaaattacatcggttttagtagatggggatcaaaatatccggcagtacagatcagatatacgaattagattttggatatatattgagagattcaaagtgctcttgttccactgaaaaacgtgcagccgaaatgtgcagcccaataaagtggcccagaacggggatgaatcaatgcggtccgtgaggcccatacatattaggccggaacgggagtgtcggccggaaaggaatgcggcctacttgaggcccataaatgttcgctgggccatacgtgttgggagggtccgactgtacctgcctgccctcgggccgaggcctctcagcctctcaggctagctttagggtgagcaaacttttactctcttcagcgtgctaccacggcccacgacagatggcagcgtggctctcccagctgcgagtttagcgtgatcttccggcacaatcgcatgataaggagctgagttacgtgtgacacggttcaggcagatgagtacatatactggtgtttggctctcttatcgcgaagttatagcaaaagtagttaaattgagttcatatgaaagaatattatgtttacctcgcggagctgttcaggatgaagtgagaggtaagctgggatattttagagcagaatgaagggagatgtaggatgagatattagagcaaccagtaaacatggtccgagtaaacaaaggtcaacctgtatccatatacttagaatattaaactaattttcaacgatttactatgatgatgggataaataataacacccgactgtgggataaatgatgacactgacggttaaaatgtttaaaaaatagtatgagtaattagatatgaattatctaaccattaatgttggatagaaatatatgtgttatccatataatagaaactagcatgatggcccgcgcagattgcgcggctagtattattatattttctctcatataatagcatatatattttcgtaatgtattattcaaatatattaaaatgaaaacataatttaaattttgtactaactttacaaaactactaatgtgtaatattcatattgtattttatatccgtgttagttattaattatttttaatattaatttttagttatttgtaaattatattcctatatggaccctagaatcgtctttcaatatttctttttaaaattccgaattttcgttatctgtaaattatatttttatatagactctagactcttcttccaatattatttatttttaattctaaatttttgttatttccaattgtatttctacgtggactctaaactcatctttcaatattctttaacttttaatttcaaatttcagttactaaattgtattcctatattgaatttagactcttcttcccatttttttcttaatttgaatttagttatttgtaaattttatttttatatgaactctaaactctatttttaattttattatgtttattccgaattttaggtagtttcaatttcctatatggactcatacttactgtacttctaatattccttatttttaattcttaatttgtattatttcttaattgtatttctatatggactctatactctacttctaatattccttatttttaattccaaatttctattatttcttaattgtaatattccttatttttaatttcaaatttctattatttcttaattgtatttatatatggactctattctcctcttccaatattcctttttttaattacgaatttcaactatttctaaattgtttttctacatggactctgttttacttttttttttttgattaatatgagaatttctaaaccgtgagagtgaacgtggagtctcctttttctatttcttttaagttaattaatagattactaaggaaatttctgaactctaaatcaaaatatatatgtattatccaatatgtgaattgaaatagatgtattatcattgtaatactaggaattacctataaagtatccaaaattatctaatgaggttgtattaaaatataagcatattttctattcttgaggagatactataagatacgagataacaatttaatctaactgttgatttagtaaaggtatgattgggctaaacaaatttagggtggcgctaatcaccgcccatctcagccgctcagccaatagcacctccgtgccacatcgaattcgccgcggccgccgtcgcatcgcagctagtccgccacggccgatgtctcatcgaggccgccgcagccgacgtcgcatcgaggccgccgcggccgcgcgtcgcatcgaggccggggcatcccgtcgcatcgaggtcacagcggcagccgtcgcatcgagcccaccacagccgctgccatcgcatcgagcccgctgtggccgccgtcgcatcaaggccggcgcatcccgtcgtcgcatccacctcgaagactctggcgtcgcttccaccccgctgctgttgtggactccgttcttcctgtgtcgtctggtgcagaccaaccatcgtcgtttctcttgctactcctgacaccatcgtcgtttctcttgttgctcctgcccagcgattcgttttctctcgcgaagatatgacgatacaactcgaaagtaaaaaactacccccacccacagtaccacttcattggggaggtgcggtagcatgaggtaccgacgtttttttttttttactgttggatgatgccaaatcaacggccacgatttagtactgcacaacctcaaggacagtaaaaaatctcttaaaatatatgtaaagttataaagatcaaagacatttagagttgaattgtatttatgattaggagtaaaatacaccgccggttcttaaagttgaaatgtggtgtcacttagatccatgattttgtaaaattgacattaaggtccacgaacttgtttaagtgaatcattgcggtccaaagcatatttaaccgggttgacagtcctatatggctgtctagcgtgaccacatatttgctattacatccctctgtgcccaatccaccctcttctcccccaaatccttttctttttcttctccttctctcttttttcctggtttttctctttgccgctgatgaccaccgacaagatccccatggccgccgcacccctcctctccataatgcgcccttgtccctacaggtgagctggccggcaagctcgccccggtcatcgttaccgagttggcccctgcctgcgtgccctcgagatcttgccgctgccgtcaggctcaagcttgacgaggtagccgtcgggagctcgatggagaagaaggcagtcgcggtcacggcctgattcgatgaggggggtagtggacgctcggtctaggtgccccgtgcccttgccatagccatccctccaccaccgccggagagagtagcaccatcggggagaaccgtgcctcactgacagctaggagtaaaaactgtacggaaactttccggattgcggagttatttttgaaaacagaatctgtcagtcagaatttttttcggaatttttcaggaacggaaacggattcggaaatattttctcggaaacgaaatcgaaaatgataaaatttctggaatttttctcggaatttccagaaatcacaaaataccctggatttttttaagcactaaatagttaatgccatggtgtttggctgttatttattaaaaatatttgttatgcaaattacataagaatatttttttcctgcattgggatttatcaacaacgttactaatttattccatagattgtgttttgtgatatactgttaatactttacaattggacttatatgattgtgttttatgatgaattgttaaccgttgagacttgagaattgggtttatcagtttgaggggtttctttattctgataaattttcgttaccatatccgcgtcattttgttttcgctccgttttcggtttcgataatatttgattccattttcgtatccgaggtttccaattccgaaaaaaatatgaaaacgaaaacgataaagatgatttccgtccgtttccgtaccgttttcacccctaccgacggccaaatctgccggtctcccttcccgccggttgtcggtgccggatcaaacatgtcaccggatccgcgccgtgatgcctcgcctccagagtgatggatgccgagctccgcctagtcgcttgctttggatccggccttctcgccagttgtcggcgccgcatctgacctcctcaccgccggatcggctctacgccgcctcgccgccggagtgatggatgtcgagctccgccctggcaccggtgttggatccggccttcccgccagtcatcggcgctgcatccgaccttggatggctagtgtccacatgccccttgtccccaccgccgccgccatgtttgctgcgccctgactattctgccgaccaaaccagtggtgcaaaagtggaagggcctaattgaaaatatgtggccacgctggacaatcaacctagtcaaacatgttttggaacacaatgattcacttaaacaagttcatggaccttaatatcgattttacaagatcatgaacctaagtgacactacacttcaactttaagtaccagtggtatactttactctatgattagtcttaaatactaataaatattcatgactaacactatagatttaccctatattatctctatattattagaaattaagtagggttgtgcaacctcgtctgagtaaggttaaggcctggtttagttcccaactttttcttcaaactttcaacttttccatcacatcgaaactttcctacacacataaactttcaactttttttttcgaacttccaattttagcgtggaagtaaacacaccctaaatcaaaatgtatgtaaagataaaacatcgtagagttgaattctatctatgattagtcttaaatactcataactaacacgccattgaccaattcaatttttaacatggatttagaggggattttttttcatgcttacattttgtactaaacatgtttttccaactacctactatcctcatcgttttttcactctgattaaaaatttccttaccctatgaatctctccaaaactttttatcaagttctatgaacaccttagaagattgcctggccgcacagcctatcttgattttgcaacgacccactatcctcatctttttctattataattttgcgtttcgacaatcactacggcatcggcgaagattaaaggcacagccagcattactcaattaacgacgggcctaaacaacgggttcacaattgttgtgcagtcatcagttttcgatcgccgcaaggttgttgccttgtccacctacgtattgtctgtgtacagaaacagaacaccgctctcactgtccatctgctccacgcgtggtggaggtcaacaacaagaaggaccattgattcaaccagctgtaggagcgaagtaacttctactgaatgtttctctaacctcataccaactctaaacactacaaagatcagtcagtaataccggcaactttcacttttacctttacagaacgaccacgaatgaagtgcaattgaattaaccacggatgtcatgcatttcccgtatgctgctctggagtgatcgatcagtgaattaagttaacctcccaagctacattacacagcgacagctcactcggactgtagctaagctagcagcagcgacttctgacgagcactggccatagcggtggttggtgaagggaggaagaagaagaggcgaaaaggtgatgtatggtagctttgcttcccttgcaatgtaccccaccctcccaatcttgtcatcactccgccacgttgctgtcggatcaatcagaaggggaattgtatattttctttctactgatcagctagtggtagtggtgcatgcagatgcagtgccactaatgcatatgcaaaggatcgatgcccttctcattattaatttgtaccggacttgaatcgatcagcaatggaggtgtgtgtgtgagtgagcatagctactagggcagcctcattgaggagatccaggctgttggtagagaggctcatggaccatgatctaatctagtggtttgcgagtccctgtcaggcataattgcgggtgaacagaagctggccgcggtggctcggattggttggtagggggatcagatcttgtgaaaactatgtgtgtttaaatttccagcaaatatattgccattagctagaatgttgtaatttagctacttcctagagacggctcctgtagtcctgtgcccgtgtctgaactctgaactgaaagatacgcacatgtggacttgtatccattccaaacatacactttgctctctctgcatgcagagcagaatgaaacaaaacaatttcgacctgaaactcgactgatctttgtacgtatttgctcgtgagtcgtgaagggaaatgatgggtgaacggaccggcaccggggagcagagacgtgtctggatgcttcagatcagtgacttgagaatgggctggctagctggctggcgcctagactttgcttcagaatagagcataaaatcgctgtcagtctttctcggtcgatccaaatgatcagaagctgcattcggaagcaccacaagatgcttaattttgtttctcttacctctctctctctctctctatatatatatatatatatatatccatttttgttgctgttcaagcagtcggttggcgcttcaaatcaccaccctgattgccattgccagctgagaaggggctcgtttattcgagtgactgcacatttgattactaatcatcatgcatggccactgttgcgatgcatctattgtgtgtgactagctagctaagcttgatgctaacctcacactattggttgaggaaattgatagaaatgacattgtatgattacgaaaacgacgtatgaggaataggtgcggatgccatgcaaaatcaaacctaagttttcaaaatccttagtacctttgtaaataaaatacaaaagttggttgctttacccttcacctttagttagtagccccttttctttaatttattggtcttaggagtggtgtagtctttattgatttttgcattaacatttgacagcctatcatgtggtagttcatgccaatatgttttgctctgagtggactattgcaaatagtctttctgtatagtatctctctttcagacaggagttcgtgccagtaggtagatatgtatgcgccagctaaaatatagccgcagataaaatacggcatcgatcgattgggtcacaattaacctggaaattgaaagtctgaaaccgtcacattcactactgattagaatctcttaaagggaccaattaactttgcaaggggagctaatataatgttcagacattcagtgccttgatgcagtactactacatgagatgtcctccttttgggtgctgtcaaaactgaaaacttttcacacacactcacgtaaacacgctggattatattatatggcccttaattaactgatccaattaattgatcaagcagacagggacaatcggacaaatcaattggttgaaccgccggagaagaaccatccctctcgcgcccaaaaagacggcaacgaaaaggttcagtgctgtcgttcgcaattgcaccaaccaaatacaattacggatgcatttgccctcccgatctgtgtacgtatatggttgagaccacttcgtactgcgtacgcccaattttttgttttaacgaaccgacgctttcattgaatagagcaggaaaaaaactgtacaatctaaacgggttatttacgaaaagtgaaaaatataacccctaaggaacaatgctagcaaggccccttgctcctgccaaagtctaggactttgctttctctttgatcttaggcactaggcacgatgccaatagctatttgtatctgaatatctgctggtttcgctctgtccatgtttcccaagaaatcaggaggaaggttgcaagccttttttgcacttctgggttggaatccaggtccaaccaccactcatggaccgttgcagggttactccaaattactagatcgatttgatcttgggaggtccaagttgatatcaaaccccaaatcctcctcgtatatctacattccgccatgaggtgtagggccgtctccagggtatgccagcaaagagggtagtaagcattgttttgccaaccccgtattgtgaggcggtacgaagccatactctgttttggatgatcacccatgtgcccagggcttcatatgatcgtcgtgtagtttgtactagtagaaccaaggaactgcgctttgtatgtcgatatcaccgtatattccccgtgggctgtaagtttccaaatgatttggtctggccagttgatgaaatacacattttgaaccatgctccagagagacactagttggtccaggagttcaatgggcatgccaccactgattaggaggttaagatcttctatccatgtgtcgcccttgcaagcttccctcaacgtcctgattttccttctagatgttgcatgacacttggcaccaggtctttcagtcttctaccttgcaaccaaggcgagtcccagaagcggggctactgacccatctcccactgaaatggtggtggccgccgcaaagagttgcttgtccttctcgatgcacggcatcacgtgccccgtccaaggttttcttggggtcttccatccctgccagagccatcttacatggaacgcacatatgaactcctccaagtcgagcgctcctatgccgccgttagcgatgggggagcaggttcttgtccacttgaccttgcattttcctcccgtcaggtttacacatcccacccagaggaaacgcttacgctgcttgtgtaggacctccaatgactccttgggcacttttggtgcggttaggaaatacaccggctgcgagaagagaaccgctttcacgagtgtcgttctcctagcgattccggcctctccaggcagccaagcgcctagtggacttatcgaagaggggctggaggtcggccctgctcacccgactaaccgccagcggtaggccgaggtacttcaggggaaaggaagcccttgtgtacattgatacaagagcttttttttaaaaaaaagtgggaaaaagttttgcctcgtatatattgatagaaaagaagttaaccaatgattataactttacagggcctttaaagaagggtctaaaaagaaaaacgtcttacgggacctctcttgaaacggtgagctctgcgaggcttcttgccctggctgttacccatgttatcgattattcctttatttttgctaggagggccatcagtagtttttcaaagtgccagaagagactagtatcagtgtatcacccgtggctttagtacgttcgccaggttatgtggtatgtgaagaagattgtaccaccattcctccaccgagacacagttgccccagctttggggatttagctggagaacggtccacctttgaatttcagcccatactctctgagagaacctgcaatatgctaggagatgcaaagccgtctcttggatgttggctggcatagcgggcataaccgttgatttacccaacctcgtttctgtagtctgtacgctgtcaaaatctattttgcgtacgtccaatatgtgcccttcggtattcagataccgacgcgaatttgcatatgaagcggagatcgatcgagtaggtgtggtgagtggtggcattttgcgtttgcacggttgcagccgtggcgtggccgtgcgagacgacgtataggtttgaattgtacggcgacgtagttagtgtcagtgtggctagtgggtgagtgaggtgagccgggctgagctggatggtggcgagctactagctgctcgcgcttatcgccagcgcgcgcgatcgggagcgtggtcacaccgcgctatatataactgtggctcgcacactcgcttcctcccactgctcgagtagacgagagatcgaccttcccagacaccggcgaaatggcgctcctcccgctggtcctcgcgctcctcgtcgcctccgccgccgcgcagcagccaccgacgcagtcgccgccggctcccaacgcgccgccgtccaataccccgccgccgacgcccccgtcaccgaccacgcctccccctgcaccgccggcgccgaccacccctcctccggctcccaccacgccgcctccggcaccgaccacgccacccccggcgcccaccaccccgccgccgtctcccccggcgacgcccccgcccgctcccaccacgccacccccgtcgccgccgtcgcagcctcctccggcccccgccaccccgccgccgtctcccccggcgacgcccccgcccgctcccgccaccccgcccccgtccccgcccctggcgcctcctcccgccacgcctcctcccccggcgacgcctccgccggcgctggcgcccgcgcccaccccgtccaccgccccgacggtcgcccccaccacggcgccgaccgtctccccgatcagccccaagacgcccgcccccaccgcggccacaccctcgccgtcgctctcccccaccgccaccccgacgaccgacaactccggcgccacgacgaccgcgcgcgcggccggcgtcgccgcgctcgtggcattggcgggcgccatcttgctttgagccttcgagtagtgtcgctgttgctttccttcctcctgtaccacagctagctgtgcgcggcggcacggccacgcttcagctcgcttctttctttaattttttttcttcttcttctttgtttttaaatttttttctttcgtgtttgttatttaaatttttaccggtggtatgatcgatcgatcgattcttgatgtacgatgcattggttgtcagtccgcatttcttctggtgatcagcgggtggttggtgatgatggttagtgaaagatctcttggtgtcagctcgctatgtacgttaattactacttttttttggttctatagagggaagatttgtgtatatttttggtgtatcattttcggtggcagttgaataaaaaatctccatgcagctcatctactgcgctccatgctcaattactaattactgtcatactgttccatgctctctttttttactcagcattttaactgtgtaattatggggtacatgtcaaactgtcctgtgtggctgtgtggagagggatcaagatgtcagggcgcatttgagacgactgacgcgaccagaccatcaactatccatgtgcaactgtaaaagaaaagcacggacgctttagatcgcgcgtgagattttcccctgcacggctgcacctaagcagaaaaaagagggaaaagaaagggccatgtgttgcactagtacacaaaaagctggcggaaagcgatttttttttctttctttgatggaatgatttggaacatttgtctgattttttttaaaagaggggacagtgtttagttgggcccttctcttttgatcaaattgacacttgagaggcccatcggctgtccagtagatctaggctgctgaatttgtggctaccaaccgaattagtttttttaaatttttttttcaattttcacatagtaaaatcacacaaaactcctacgttccgaagtgaactggttctgtaaaaatagtcttgcaagttgcaagaggcctgcctttggtgtgaaactaggaatgcatcaagtaacattgttttgtttgtaagcttctaatcgaacaaagaggcacatttattttcagaaaagtttaaacaaagaaaatgctacttttaattttatccagattttccaaaattttaaaatgttgcattgatttttgctttagtactacagcactgcagtactccaaaacttgccaagtgacagactacgcagatacggtggcacgccataatcaagaggcggtagagtcattgatcacccattgaattgtacaccaccgagtagttaaattagtacaagctcaattcaaaagcagggttgttcagttttgtaccatttgtaccacgatgtgcttctttatatggttgtaccgcggtgagagatcactagatcgatcagggatctgctctgatcgattccaaaacaatcttttcgaattgaagcagtacacagcattatttctatcgtgcattacagaactccacagtccacacactgtagtccgtagctaatttacagagaaaatcatgtgcggtgtgatgaccttgttactgttagaaagtagaaacccctctcaccgaacaccaatcaagctcaggaggagcccctgctcgtaccaatcacggagtaaattaagcagcgagacccatccatgatccaccggcacgcatatactactgatgtagtactgcttttgctgccaatgatgcgtagtaccaaatgccttcggaaaaaaaagggctcgaggccctcgcgagtcgcgaccccggatgcagatcggagcaacacgcacggtaggtggcgacttggcgatggcgagagcttggaggggtcatctcatcccccatcatcgcgaatgatttgcgaaatggaaatgagaagggggaggagagacgatgggtgatcgatggaccccggccgatcgtctggtgaagctcgctaggtggtattctccttgtcccaatataaattgtacctaggactagatataatatctaaattcgttgtaatattatactttctccgtttaagattaatgacgttttgactttgctcaaagtcaaactactttaagtttgactgattttgtaaacaaaatagtaatatttttaacccaagactaatattatgaaaatttattctattagatttaatgaaactatgctgatgttgtaaatattactttttttctataaaaatagttaaatttaaagtagtttgattttgaccaaaatcaagacgtgttgtaacctgaaatgggagtatataaaatgtcacgtctaatcataggtgaatttatattgggacgggggagtgtgagctagtagaccgccacgcaccaactcagaaacgatgattaaaggcgaggcacagcgctgttgggtacatcgatcaagtacagcgccgtcctccggcggcccaggaggccgcgagtggagacgatcggagcgacacgccatgggcggcttgtcggagctgtcaagagtagctttcacgcaaggcatgctagtaaagtaatttggatcgatcgatcacagctcatcataatttggttttacaatcactgatgacttggtgagtagtaattttatcaccggccaggtgctgaagcgacagatcggcatgggattgagattattctttctccaatcacaagaaaccgatacacgcaggcgcatatccgcgtcaaatctgtcaaattttttttcaccgcatgaaaaaggctccacacttgcgcgcctcgtttcacggccatgattttgcacataaatagggaacaagatgtggttacgagggccatcctccggatgaacatccggtagacagcatgtaatgctggctgcgtgcgtgtgggccaaaattaaagcacgcagaggcgcagagcagagcgcgcgccgggaaaaaatgagaatacccacaactgggctggaacctgcaaagatcaatgttcttctactgctaggagtattaattaatttagcttggtttgatgaatgaatgctgctgagtaacgcctagtcgagtcgttggctcgttgctcaccggagcagagacggtaaagttttgcccgtgtgctcgatctccaaacgagactacacagatctaatctgttggctgcagcaacggggccggcatataattgtagaaatccgggttgccaaccttggttgaacactgaattccaagagagcgatagtactagatgatggatcgaccggacagaaactgcaggtggccaattaaattcacaggtaagtgccaggtaaataactcctagctagaacaccgccaacacgtgagtgagttatacccatcatgtgaagtctgggttcgtagcatacagcgtatacgtactacactaccatgaatactttgctgtctgtacgttatgactttatgagatcgacgggcatactgggtattcatgtacggtgcatgcgatccaagaaaactgatcaaaactagtacctacacagtgctcatggcgcagctaaatgctaacgaactcatacaacgttcttggggagtctggactctagttaaggttgtgttctatacaattactgtattttctgaacttatactactccctccgtcccataatatagtaatctaaaaccggacgagacacttcatagtacaacgaatctggacatgaagattcgttgtactataaagtgtctcgtctggtcctaggttgctatattataggatgggggagtatcttatttttcacgcacacgtttttcaaattataagaatgttttttttctttaaaaaataaatatatggttgctttaaaattatattattccttttcaagattccttaatagcacttaattaattctatttaatgtgttaggaggaaatgattcttaaccccacaaacgaacacatctcttaaggtcaaaatgctcatatcgggactattgctgtaaacgaatccctgtcctctgtcttgtatcgctgattcgctgatgtgggcagccctaatacgcgattgatcgagcgcggccgccagcgcgtggtcgatccgcctcagtgcgcgcggctgggaccgcttttttagccttttcggctgatgcgggttctccatgtttctcgcattacaacattggacgggccaaaaattggcgttggctatgtgggctaccagcctatgaataagttcatttgaggttacttaacttgacgacgagttctatttttgtcccttaaacacaatagcagatatgataggtcccttaactatcaaaactagttcagatgagatccttcggtggtttagatggaggttttgggggcttatgtggctggtttgacttggtcctcgtcctacgtagcgtgatgtggcactgaaagcaaaatttaaaaatttaaaagattttttaaaaatgtgaggcccatataccagtcggaaaaaacaatgggaccgacttgtcactcctctctatctccacagtgagtcagcacctcctctctccctcatgtcagtgcgggcagacagcggggccaggggcagcgctccataacctcctttgcgcgatgttgcgaccgttggcagggccaagagtgacgccatcctcttcagcctcctacctcaatgaccttggcggcggcggccaccgtcgcgttcgagcgggatggccagcgaggagggggccgcggctgtctgtatctacgagtggtggttgcggtggaagtcgccgatgaggacacgacgacaaagacttgagatggaagaaagcgatggttgcttggcagcggtggtggcgtgcaaagttacgatcaacggcaggcaaaacacaacatcgatgcgtagttcatccagtcgtacaacaccgccaagctacagcttcttctcgagcagctcttattccacctgtagcaccgcttacaagagcaagcaagggcgccgctgtcggtgacgacgaccttagccgcatcaaggccgtggacgtcaccgtgccaggcggcgtcgcgctcaccgacggatcccttcctagcggctgcgaggaccgcggctacggaggcggcggaggaggtgaccgtgcgtgctacaagtgcggcaaggaggcccacatggccaaggactgctcccagggcagcgacaacggcgcgggaggagtacaacggacgatggcctcacccaacacggcctcgacggcagcagcgtcaacggcagggtcacctcctccactctattcgggtcaacgaacctcgactctgcgtcgcctgcggcgtcagcgttgttatagttgtcctccgctgccttgccctacgcatgtgccagcttgctccggcagtcgtccgtcatgcttcgcgggccggccgcttcgccccgcctcggtcgtcacctgctccggccgccctacggcgtctaggtgagagagagagaggatagagagaataaggatgacatgtggggccaaatggccccaccatttttattattttgtgtgtgactaacatgtgggccccacgggttttattatatttccagataaaattgtcacttaagcgccacgtgggacgaagacctagtcaaaaggatccacggaggcgccacattagccaaaaccgccatctaaaccactaaggtatctcatatgaatcggttttaatagttgaggtggtattgcggttaagggatgaaaatcgaacttgctgtcaaagttaaggaacctaatatgaacttattccaccagcctaccacatggttgcagaaacgggcttggaatcagaccatctcgttcacacgcccatgggccaaaaatccaccagtccttcctcacgcgtcgggccacgaagcccacgatctacgcattcacccgcccaacggatgatggctatgcgatcgtgcgtgcgattcgatgctatgcacgtagacaagtacgtgcggtgcaccgatattcgtatcaccgtatgccgtatgcgcactcgttgataagcagcactcgcacggggtcagggtcaccatcaaatagtgctaatattacggagtatttttgcaaagggagtaatcaaagttccaatacgaaatcgcggtcgtagtagtacaatacaaagacgagttcacggagcgcgtaaactaataaggaaaaattaaacgtcgcggagaaataatagccgaactggatgaagatgagcagcactgcctcttgcctagcctagcccatcatggcgaggccgacggccccgaccagcaggcccatcaccgaacgggcctcgctgccgctggccccgccggtgctgcccgtcgacttcgtcgtcgtcgtcgtcggcgtcgtggtcgcgtccggcgtcgacgagggcgtgtccatgccggggtccgatgacggcgtggcgggcgtcgcggtggacggcggggacgacgacgccgtcggggtgggggtggtggcggccgccgcggagaccgtgacggcgagcttcatgccgccggagcagtggccgctggtgccgcagatgaagtagcgggtgccgggcttggtgagcgcgatcttggtgttctggtcgctgtaggactggatcgagttgctggcggagcacgcgctgtagtcagccgagctcacctccgccaccgtgtgcatcatgctgtactggaacactgcacatagccacacaccacggcaaaacgtgcgtgtcagtgtcacgtttagtttgggcacagagaggaccagcttgcactggtcatctatcaagcgtcaatttataggtaaccagaaatgggtggagttatgttcccacgtacagtacccctcttctgtcatagtacacatttaacgcttttaaacttttgtgcattaagtttacgatgctatgatagtactgccctattcttagaatatatcataaaatgtagttattttttcacctactcatttcaaccaatcgcaatcatttttttcacatattttctctcatcgaccaatcacacacttcctccaattaatttcacctgctatcctaacacatgtgctaaacttaaaaatgcttatattttgtaacggaggatacagtagtactacttttcaaagtaaatttatctaccaattttctcttaaaaaaacttaaacatatcagaagtactctattatcgtaaagtttcaaaagtttaattaaattttgtaataaacatagaatattgccaggctggcagtttttgcctcgcaagccgatagtgatacactactacacagtactaccgctactatagctctggacaaaccaaatttgtggtccagagcaacatgaagggctggtttggtttgtgatctaaattggccttaccaatttttatcgatgccaaattttagcaagttttgtcatggctaattttgacaaggcaaagttgtgtttggattgaaaccaaaatagcctatgttaactattgaaatgacatattttcttaggcatgtcaaaatttgacttcaaaccaaatagacactgaacactgttgaaattatcaaatattggtaaggccaatttaggcctcaaacgaaaccgtcccgtaacatcgatcgtctagcattgttggtagacggcacgtcgatcattaacaacaactgtttcgtactacttgatactgaaagtattgttggttagtagtattaagcttatctagagtagtaatgtaactttaccgagcgagtcaccaacgctgaaggttttgctcttcgcccaggtatcgtagtccacgccactgctccagccggatgtgtcgccgacggtgtagtccacggcgaaagccggcgcaacggcggcgaggagtagcaccaccagacctgcagctgcaagtccatgtactccagccatgatggcagagttaattagcaaacgcgaactgattagagccgtactagtactggtggcttcactgaattagtgagatgactgcaggtccactgcgggttatatagtgttggtaaagagatgcaggtggtagtactaactaaagcgaactgaaatgctgattagtttttgggtgcagttgggtttagttgtgcttggcaccaactctctcctcttttgctgctcccctgattgcctgagctctgtccgtacgtattcggcgccagtggcacagtttagctgttgtatttgtatatagaaaatactctcgttaaattagtacagattcactagtattgctcatatacgtgtactgataattagctgtctgctgtcacacacaatttaaacaacagcaactgcgatttctgaatatagtgacctaacaacaactgcagatcaactgagaatatcttctattttgctcccttcttccgtcaaggaactactccactttttagttgacagaacagatggtacgccgcggaatcatgggtcatcagaaatacgattatcatcagtcttcaccatatatcgctcgtgatttccgttgcaacgcagaaaaaaaaaagattacaaattaaagcagaaatatatattgttataagtgatgtaaagagaagtttttttttagcaaaatagcataaagagtcaagaaaggtgcaacgaaaagatgttgatggcagatgttggttgaaccgttgaacaaacctgttaatttaattagtgaatgtacactgacggactgacctggcttaatttgattaatcaaaccattgattgattgattagcttttccattgtcggcagttaattgattgactatatgcatacatagggcaataattgccctatatgtagttccggagttacttcgtactccctccgtttcaaaataagtttttcactattcatgttcaacgtttaaccgttcatcttatttgaaaattttttataattagtattttttgttactattagatgataaaacatgaatagtactttatgtgtaactaaatatttttaaatttttcataatttttttaaataagacggacggtcaaacgttgggcacgaatatacatggctgcacttattttgggatggaggtagtactgtaccatttctttgtggagggtgatcatgcatggtactgctagccgctaggtgaccatgggtcatcagaaatcatcaaacttaacgattatcagcagataatttgattaatcgaacaattgcttgatcatatgcatgatacgtctaggcatccttcagattatagaatggaggaaactttttaacattttaaaggagaagaattaattcatgcgaaaattctacgtacaaaattcccatgtttcaaatgagtcgtaaaaatgtttcgtttcactgctaacgtctcgccagtccttggatgatccgctctctgtgctttccctctgtttgacctttgaccggataagtgttgtgttctacctccgtcccaaaatgtttgacgccgttgatatttttaaaaatgtttgaccgttcgtcttattaaaaaaatttaagtaattgttaattctttttctatcatttaatttattgttaaatatacttttatgtatacatatagttttacacatatcacaaaagtttttgaataaaatgaacggtcaaatatatttaaaatgaaggagggagtatttgatttacggttataatgggatctttttgtgttagtatcaagttgataaccgatatattcccaacaatacaccctgcttcttctctcctggtctcgcttaataaattggccggccggcgaacttttgttggcccagcgaaaacaacattcagggtgtgtttagtttacgttaaaattggaagtttaattaaaattagaacgatgtgatggaaaagttggaagtttatgtgtgtagaaaagtttcgatgtgatagaaaaatttgaagtttaaaaaaaaagttaaaaactaaacgaccaggcctcatttacaaatcgaattgccgacaatttccttgatcaattttggagtaattaggggaagcactactggtgcactatacctaccaaagttcaaatcatagtatctacggatattacgcatatacaagtagacttctaacgggattttgatgaggtcagtgatatgatgttagttttcgtgtcttagagagtgtgttaaaatgatgtatttgtgggggtgtgagtattgtgttgtgtgtgtatacgtctaccgtataatcggaaaaaaaagtacaaattagtctgtactaactagcagattttcatgaacagttgaattcaactctgaggacaaacaattttacaaccttggttcattataaactgagtttgatttttacaactcgagtgcatacacgctcgatcagtttgtttctcttcccttaaataccaattaaatggttacagaaattctaaaatatccagcaccttgtaagttttcaatcccaaattatatgtacacaattgtgcgggttgtttaaaaaaattatatgtacacaataagaaagtaaatagaaaaaaataggtatttactccgtcctaaaatattacaacttttaacattaattttttttccaaaattataacattttcttcacctaaattttttcatccccttgtttttctcaattaatcaaaatatttctctatttaatttcatctggtttcttaatgcttgtatccaatctcaaaagttcttacttatattgttctaatgtttgtgaagtgatgtacggcgttgtaaatttgtaatatgtgttattaccactactaaaaaatgattttttatggtgttaccttataattttcgctagcggctaacgcatattccgccagcaaaaacataacgaggggtggggggctacggactgccagcgaaaaccgattttcgctggcggccacgctaagatgtccgctataaaaaataactctatttttagaggacgatctcttaagggtcccacagcaaaaaaaaaacatatttttattggcggtagggtaagaagtccgcttacataaataattctatttttattggcggggctcttaatctaccgccagcgaaaaaaaatcggattttcgctggccgtactgaagagcatcactcttaaaaaaaaatcacgcgctaaaatatctcagcccattaaaaatcaccacccaccacacctacccatccttatccctcctcctccctccctcgtggcctcctctctccagatccacatcctctcctcctcccaagctgttcggtggcacggccgcgacgaagggaggcggacgtcggggggcgcgacgatggcgactgcgacgggatggcgacgggggccgcggcgaagggaggcggtcgtcgtggggcgcgacgatggcgactgcgacggggggcgccgccgcctagtcccagctcctctccctctctctctctctctctctctctctctctctctctctctctctccattcggccggcgtcacagggcggcgggggagggggtggctcggcggcagcgcttttctcccggcggatctggcgacgaggaggcgtgagggctgcggatctggcagcggtgactccatccgccgccgcctagtcccacctcctcttcctctctcagagtcccccctccccttcccccgccgccaccaccccctctccctctctcagatctggcgcgcggggagcgatggcagtggcgtcgtcgaggcggaggctgcggcggggctcggtagcggcggcgtcaaggcggatccggcggtggtggttctcaccggccacttcaaggacgacgacggcaacctccgcagctggttgggttcagcagctgctgttcttgcgatgaggcaatgggtgatgctgggaacatttttttttctgcaggatcgacaatatcgttggccctcttaagaacgcgcttgcgaaaattggttttcgcaggcggttttatgaccgcttgtgaaaagcaatgattttctctggcctttacttattggcgggctgctcagccgccagcacataccactttttgccgccggcgtaaattttttcgtagtagtgtaccttttcttttctgaaaaaaacattacattatttgaatgacttgaaaaagatgagtgtacgtgcacgcacttaggtcgtaaagagattgtctccattttaaactcggtcactcggaagtatttatgatgttggctgtttgttgttcattccatgagtgcactttcagggaacgtgcagtttttttttcttctgaacatttcaaactgtgctatagtcaaatacaaagattttttttcccgttttattcatccttcaagagtacacaacagatcatgctcaggatttaaataggtttacattatcccgccaagaaaaaaaaaggaaggtttacattacattggttttcgatcttgacgagtacaatctctgaaatttctctcattgcaacagtcgtagtcatacataacaataatgtgtactcgctccatcccataaaaaccaatctaatagtttcatccaatactagattggtttttatgacatgaagaaaatactatgttattttacgattgtcatcaacatacacatctgcttcttcttctacttggggagagtggccatgacaagcaacgacccagcgccgtcgtcgggcatcacgacgacgagcccttcgtctccgccaccgccggtcacgatgctgcaggagacatgcacgggcttgctgcccctgagcaccagctcctccagccccagctcgctccactgcaccgcttccagcgaggcgccgccggcggcggcgccaccaccgggcgacgccgtgcacgtctcgatggtagtctttccggccagggaatcgtccccgccggcggcgtcgacgacgacgaccgagagcctcgacaccttgtccttcttgccgagcgcctcgctcgccttgtcgacgcaggccgccgcgagcgcgcggtgatcaccgtgcccgccgtccgccgccgctgccgctgcagtaccggccctgaagagcacggtctcggcgtcgccgtcgccgtcgccggcgaaggagtcgatcgggacggacctgacgcgcttgcgggtggtctccgggcgctggaagtaggcgaggtactgcgccatcgggagcggggtggccttgccctgcgccctgatgcgggcgtgcgtgcgcgcccacgacaggaggaacctcgccagcgtcagcgggtcggccagcaccagcgcgcagctcacgccgacggcgtacccgccgtctccctggaaccgtgtcagctgcgcacacatcaaagcagacgaacatgtacgcgcatcaagatcagagcagtgcacataccagtaccataccacctaaatgatctcatgtacacatggagctcgtactgtggcgtgctgctgccgccgcgtgcgcccatgccccatgaaaaggcatggagctcgtgctgtggcgtgctgctgatcgaacgaacggatgacacatgttgtgcggcacatttaagatctttttaaaatttattattgaacattcttcattttagaataaacctttcctaaacatatttttcaaaatcaaaaccgtatggccacgccagctgaactaacatgtcatgcttggctgacatggtaaaacaataactaccacgtcaggttgactggtattacatcattatttgagcatgttgatatgattgtcgaagtattatcctgccacaccactctagctagcatgtcagtacaaatcggtcacgcctgctataggtgatgtggcagtgttattttaccaagttatgtgagctggcgtggcctcacgtagaaggttcaaattttgaaaaattagaatttaaaaaaggtttaaaaaatcacatttaacgtggtcggttacgcgtctcggtcgtattggatacgtgcatttattcgcatgatcggtgcgtacttcacatacttcgatctaaagttactcgatccgtacatgtcaaacacctgagagactcccttgaaggttgcaagtgtctcgtgcaaacagccagcgggtctatctatctggaggtgtactccactactagtactatcttgcaaccgaatgcctaacggcgaaactgactacacctttccagcaagcagcatcaaagcagcaggccggatgggtgagacgcattcgagtatccaaccccataaactccatggacgtacacgcatttaactaggcaccgaaaatacagtacgtactagtacgtagcaatagtgtttagacggagggctcagactaagaatagtggatttcctgtccctaaacttataatatacgagctttataacaaaatgaacccatataattaaaaattggttggatggatggattaaggatatataaaagatgggttagacccatatattgaaaattggctggattggtgaattgagaagatactgaatcttatgatagttacgcgcaggggcggatccaacgtgggtgcagggggattggactcgagtcccccctacaccacaagacccatagatgtctccggagcacctccttcaattttttcaccatgaatgataaactaaagatccttagatggctggaggttgaataaactgtgtaattgagcccctcaaatttttgttcctagatccgcccctggttacgcgcatacaaaagagcacacgaccttcaacgaaggttaagaagataacatgggagatatggaaggaaagatgacagaatgataacaacggcgatttataagtagaagagatgagctacagcagaacacaacctcgtacgaatcttgcattaactacttcgtaggaaaccgctcaattcctaactggagcttgggaaattcctgtgtgccagtcgtgagaaattttggtgtgaaactaattcacatcattgaaactagttttttatttccttcttcctatcgatcggcaaaggccatcaggtttcggacgacgacgaatgacgacccaaaactacttttttcatgtggcatctaagctcggatatggatcgacgtcggacgatatggttaacgcttgatggacaattataagtccttataagtcatatcattgtcatgctagtgaccaacagatggacagataggcgtttgattatgatgggcccacctgcctgtgaggcgacaagtacgtctaccaccatatcatggatgggcgcgacaacgacgacgaacaacattagattcgatcgaacgagtattccacaattcgaagtagaaaaagaactcgagagatcgatcatgccatcagtgggctagctctgtttaccgccacgccacggatcccgatcgcatgatggatgcatgattaagctattatattcatgcttgtttggatgatgcgatgggttggtggtttttgatgcatgcatatgcgcgctcacctgcatgaagaacggggggcacatgtcggggtcgtcggcgttcacgtcggtccacggcgccagcgcggcctcccggcgcgccagggcgcccttgccggcgaggaactcgtcgagggtcgcgtccaccgtcgcctggaggaggcgcacgccggtgtcgttcagcttcacctcccacgacccgtcggcgcggcggcggagccggccggccatctccgggtggtcggccagcgcctcgctcagcgactccttcacccacaccccgtcctcccacgcgcccggcgccgccccgccggcgccgcggtagtagagcaccgcgcggacgcggcgctgcagcgcgggcgccgggagcggcggcgccgccacggcgacgaggcgcgtcctcccgggctccacgacgcgcgtcggcaccgccgtctgcacggcctcgatgtggacgacgtgcgccgcggccgctgccgctgccggcgtggtggcggccatctttgctgatgttcaagagatcgacccacttctacgcgaacgcaacacaactacaacacgagcaagaggacttttgcacagccgcagcggttggctggcaccccgcgcccctacttatagttgtattcgcgcgcttgtatggttgtattcgccgcagcggtgcatgtatgtaattattgtacactgttaattgttgtttttatacttttgtggaacttgtggtggtggaccgaatgaaactgttgtgactgacgaattattcatcatttttcgaatggacatccaaccggctataaggtgggctgggacttgttaaaattggggctgtttggttggatactaaaattttgtcagaacccaacttgataaaagtatgtaacacacaaaaagtgtgatcaagtgtggtaagatgcggctaaaaaataaacttatgacatgtgggctagtggattaataaagtgtggctaacaaccaatcaaacacttacctaataaaacatggcttgtataacatatagcgtggtaaactatgataataaactaaacaacttcatcagtagattgtctttctgttccgagacgccttaaaagttgcaagtcttaaaaaaagacttaaaagtaatacgacttaaaagtcttaaaagtacaatgtttcatatgcaaccgtgtgacattctcggagtgcctttcccactgatgctttgaggcatgaaaggaggggaaagcacagcacaaaacctgcggggactagagctttgatgcttgcggaaaaagttggactgaaggagggagaggtagacaggtagctaatctcccaaaatgaagactggtcaagaagagagtacaggtattatcacatcaggcaacggtttctattgattgttaggtttgcgcagttgggggttgcatttacttacttctgcctgcttatctgttttcaaagaaaatcccccagcattattctctgccacaactctctctcaaaaaaaaaaaaaactctttcacaggaaagaagcaatactagaaggggtctgcagtacattgatattggcaggtgtgaagcggcggatggagtcttcattttgatgatagtcagagagcaatggagaggtcatgtatattggggtcttctgtgacgcgaatgatgatgaaggaaaaaaataatggcgtgggagcaaaaacatcagcaaaatgtgggatttgtttcatttttgccaaacaagtcctagctaatacggagtgtacaacctcacttggtttccagagtttagggctgtgtttagttcacacaaaaattggaagtttaattgaaattggaatgatgtgatgaaaaagttggaagtttgtgtataggaacgttttgatgtgatgaaaaagttcgaggtttgaagaaaactttggaactaaacacggcgtaggtgtgtaattattcagttctacagtacggtgggtaattattaaaaatttacccgtgctaatgttacggctctattttacaatacaaataaccagtcaaaagaagacatattctggcaacataagtatttaaatatattttgaatcgccaaacaaatatatgcagctattttttttagaaaaaagtaagaattaccccctaaactatcgtggtcgactgaattaaccccccctcaggaactcaaaagctagacatcgctcaccctaaacgacgaattaccatccccctccctcgatccaatccaaagcggttttgtcctacgtggcgatctagtcaacattttattttttttaaaatagtagggcccacatgccataccccctcttcctctcttccacatgacacacatgtcaaacgtggtcagtggtcagcagcacgcacggcacgacggggagcggggacaagcggtgggcagcagcgcgcgggcaggccggccgtcggcgcgcacggcagcacacggggaggtagaagggttgggggagggggagcggaggtggatagggaaggatatgaaatgcaggtggaaggggaggccggcgcgcacagcggcggccatggcgcaaaggcaggcaacgtctagaaacgttggctaagtggagacaacgtcgctgccgtggcactggcggccgccgcgggcgaggttcgcgaggaggcagccacgcgaacgggaccgtgctggcgcccgattggtgtcacgccccgaactagtcccgaccggaactagcccatgacgctccaaattaacctgttaatcgataccagtcccaggaaacagtgctggtatcacagggagacagaatatcacaacaacagaggtctctttattatagagtagatgtacagtcatgttgggctgcggacagatcccgagctcacaactgcattacaaaaggaaagcggaagccaggacttggaccaatcaacacaggcgcgacttgggaactaggccgaaaccctaaaactcatcgtagccggcttgctcctgaaagaactcctcatcagcaggatccgcttcatcttcttcagcaactgggggggattatttatatagagcaagggtgagtacgggagtactcagcaagccaagggaagtaagtgtttaatgcaggcttcaaaggaagggctgttgtttttgcaattgattttatttaaactcctttttgaaacaactaaatgtgtgcttctcaaacgacatggatgagacagtgcgtctcgtccggtcggagtatgtgcaatgtatcagtctttagaatttaaacaaggttggcacccggccaacagctttttcaacggccacccgggccaacaacttttcaaacggccacccgggccaacaatttttcaaactgccacccgggcctagctgatcccatcagctgcagatttttcaaacaccgaaccccttttcacacagcaatttcacaagcagtggtcaaaccaaactacgctaggaatcacctcacatccgcccataaccgtgggcacggctgttcgaacagtttgttaacctctgcagagggggtacactttacccacacgacattactaactcggatcacccagcccgtggggatcagccacgtcgggagacctccaagctttcatgacaaggcatttccaaagccgacataggtttaccatatgccgacgagaggggtcccagaccaacaacaggttaggtcccagaccatactgtgccaggaagcccaggggtcctccccgacaccaccccggcgaatccacatgtctctcggcatcaaggctcccctgataagctagttactcagccaggggtgtcccattccacccatgtggtcgtacttgacttatgtttggatgaaattccaaggaatcggtccttaagtgcgagagcgggaaaccgtacacccggtacgtttcccggtccgcggttttggaaattcatttagttcgcaagcaccgacccaggtgtcgggttttccaagtcttttgtaaaactccagttttacccaagttgttactcagattttaagtttgaaggcgaccgtcgatactggcacagggtgcacgaatatcgaggcgcaactggatggttacaaggggacatggtatagcaattaacaatggaaggatcaaatgcaacaagttaggtaggtctgccaatctgccttgcagacggaacaacagattaagtgcaatcctatcaatgcataatattttgcaagcaatataattagatttcaaatataggctcaagatgttcaaaggtggcttgccttgctcgagatctggagcttgatcctcgaaatcctcgcactgcgggtcttcgggctccgaaactacacgcgaaacgggacaactcaacaaacggcgaaaaataaagccctattaatgacctctaagcgtgccattagatagatctcgagatttgagaaattttggaatttgaacggagtcaaacggatttacggttgggaagatattgaatttctaagattattggatttttggtctaaaggaaaaggatttaattaaatcctttttggaaaagaaaaagaaaagaaaagggaaagagggagggattatagacttctcctcgggcggctagggcgcggtccaagggaaaaggagtggaccggccgagctaaatgggccggccggcccaaggcggcccaagtgcgcgcgcgcgggaggggaggagagagagggccggtggaccgggctcaccgtgcgcggtcccgggtgggacccgcttgtcagcggcttggctcaccgtgcggagggagcacgcggcgcacgcgcgcgggcgggggagggacacggtgcacgcgcgcggtctgcggaggaacggatgcggcgggcccacgcgcagcctcacggctcgcggtggaatgcgcgcacgggaggggctgaccggggttggcccgtcccgacctcggctgagctagcgccgacgtggcgcctacgtggctgccacgcgggccggcgggaggtagacgacgacgccggccggaacggacggcggacaacagcggcgagcggcggagcgaaccacggcgataccggcgaaagcgagcacaccgggtggttgcacgagacgaggggagacgagccaacggctcggattcgccggaggaagcttgagggcggcgaatcgcggcggcggcaaccggcggggagggaagagggaaacggcgacgaggtcacgaggggccgattcccggcggtgagagcatccacgcgaccacgggaatccgatgctagcgccggattggacggagctacgccgagcgaggctggcgacgtgcgggtgctacggagctcgagcggcgagcacgcggcgagcgacggcaacggtcggggcggcgccggctagctacggggaggctacttgtgctaccaccgaaaactaagggggggagatggagcgaggaggaagaacggagagaggcactaccgtgcgggtcggggcgctgtgacgagaggccgacggcgcgggagtaatctctccggcttcgggccggggaagaggaaggagagagcgcggccgaagtccccttccgcgtccttgctcgtgccggctcctccgacacgcgcaacgacaaacggcgacggtgaaacagaggggcggcaatggcgcggaggtgaatgggagaggaaaggaaaaagggggaggggaagcttgggtttataggatggcaatgtcggtttgggaaccgacttagggcggtcaaaggagagggctagcgctcggcggtcacggccaaagcggcgacaaggaggagggaggaggatgacgccggcgggagggaaaaaggggaaaagagggagagaaaagggggcttgtccccttgcttcttcgggaaaaggaggagggagcgggggcgtcgcggcagagggaggagggaggctctgcctccgtcccttggaggctagcgcgggagtggcggggccgaggcgatgacgacggcgatgacggcggggcggtttggagcggcgcgacgacacgggcgacaggcgcgggctggcgcggcagagggtgacggcggcggcgaccaggcggtcggccactcggcacgcgtgcgcgggaaacaacgggcggcgcagctgggcacgcgcgctggctcgcggggccgagcggctgcaggcgtggcagagcagcggggccgggcgacgcggacggcgcagacgacgcggctcaggcggggaaccacgcgggcgcgcgcgcgaacgacggcgcgcaggggccgtcttcgcgagcggagagctcgccagggagaggagaaggagagcgaggggagggggcgcttgcgcacgcgcgggcagagcgaggggaaagggaggggggcgctcggcgcggcgctcgcgtacacgcgcgcgcggcgcgcgggcggggcggagcgaagcggagggagagggggagagggagcgcgccgggggaggggagggggagagagagagagagagagagagagagggagcgcccgggagagggagagagggagatgggccgagcgagattcggcccatcgacccgggggaggcaaaatagacttttgcggaggactttgatttggaaggattggattcggaattggacccgacgatagatcggggattgagatcttgagatggcacggacactagacaacaagcaaagaaacaaatttcgcaattagggtttttaagagataattttccccgctaggcaccacgacggaacgggcgctacaattggcctccgtctctctcgccaaccacccgatcggcctccaccaccggtgtggagctcattccctagccgctgctgtggccgccgccttcctcccgccgcagtctcccggtcgcctgcctctctcacctcgcacacccagccacgccggccgcgctcgcctcgccgacccagccgtgtccgctgctgctcgccaccgaccggagcccgctgaccagttccccctcctcacagagggccaaaggtgagaagagggtggcggtagccgaatttgggggaagcggctcgctccgcctccgcctctaccgccggccaaccgaactcctttccccatctctctcatccttctctccttgcagtgtggagaggccctcccgtcgccgacagcaagttgatggacgccacggcctctagcgtcctcctcggcgcaccccttcacccgctgtggagcgctctcccgcgacgcaacctaccatcgtcgccggccgcccaagctctccccacctccaccgccagctgcccgagttctctccacctctgcctccaccgcccgccacctgagctctgcctccgctgttggccacccgagcgatcgatcgatcgatcgatagatagatagatagatagatagatagatagatagatagatagatagatagatagatagatagatagatagatagatagatagagagagagtagagggattggggaggggagagggatgacaggtgggtccagctgtttttttaattttctttgatgactggattgccacgttagcgccacgtatgcaagctcaagtcgaaaacaactcaaaacaatgcttaggggggttatttgtccgatttgtatagttggggtgaaggatgtttggttttacggtttaagggggtaattcgatcgaccatgatacttcagatgcaattcatactttttccttttttttatgtacatctgatttaaaaaataatttcaaattctcatatatttattatattccatagtatcctctaacaatcaaacataggatcataagatacgtcaggacatccataaattaaccatgacaagttccataatatatagtaatcattccataattcaaaatagatgcacaagaaattcactttatacaacttttttttataaagttagacttggagctgaaataagtgtagggtagaattaaagtcggactttctcatatgcactctcttaaatggagaaggggacaacacaatataatcatgacgactataatgtagcataaacacgtaggaagacgatggtgataaggccatagactcgtagcggttagatgctatgttgatcggggaggagcgcccataatcagagccccgtgatgtaagtttcagctaaacctcattaacaaatatcgtgtgttcctgtgtcgtcatcttgcatgtatcgggtgatcagtggctgaagcgaatgagaaggttagttggtgttccgctatatcgactaactaattttggcgtgggaacaccaaatagcagatgatgtcagtaccaaatatagatcatcataccatatacgagatcggaacgtgaagctggaggccaactcacctacatcgagtcggatagcagccaaagaggagtcggtactcaggctaactcgggactggtgcgactcgcatgtggtggaaatataattccacaatttacatggctctgaacatggtcagacattagtcttttttttgggtgggtggggaggggggcgagtagatcgacaatagtgatttctagggatttagcgacaatctccatatatttgtgcatggttggctacatgtatctcctatccacacacgagttgtgcatgatcaacatattgcgtgaatagggctacgtgtatgtgtgcgggttcaagtgattcatacaattaatggtgttggaacacgtggcaagctctgataccaaactccaccaccttgacgaatattcgccacacagaagtagtagaatcaccatgtcgatccaccggttattcagtcttgagttgtttcctttttcttcaagagacttcgctatctccgtaacttcttactctagaatccacctgcaacagtgttccaccttctcacatatcaccgtaactgtcttaccaagcgaaattgaactccttcttagttggcacatatgtaggatcgagatgtcgactagaggggggtgaatagatgatttaaaactaaatgacacctaatcaaaactaacctaagttgctaggcttggtgagggtcaactctaactaagcaactaagttatgttttgcaaacctagggtgatagtggctcaattatatctctaggaaagtaaatcacactcctatgtcaatgtttagcaatcctagggtgatatgatctcaggtttgtctctagaaatgtaaattgcacaaatgtaaatgcgacaatcaaatgagacaaggagacaagagatttttcactgaggttcggaaactcgccggtttcctactccccgttgaggcgagcccaactccaccgctcaaccacgaagccaccgcacgcccccttcgtcaaggggtgggcaaggcgggagccggcccacggagaggactacccaagcctcgatcacaagggtagttcttccttcactccgaaggtggtgaactccaaaccactcacaaaccggcgccgggcctcctccacaatcttctcggagaggtcaccgggcaactcctccacaagccgtctaggaggcggcaacctccaagagtaacaagcaatgacccggcgtggagatgatcaatcaagtgccacactagctctacaaatggaagcaatgcacttgactcttggctaatcaaccctctaacacactagatggatgaacacaaaactcaagtgggtgcaagggatgtatgcaattgaattgggtgccaagagagcccccttgaattgggcgaaatcccccaactttgtgctctgccggtctgaccggaggtatgtggccggtcaaaccgtgctactctgcaacggctagaaaactagccgttgtagtgctgtcagagggccacatcggcctggccggtcagaccgacatggggtggccggtcagaccggcctcggctcggtcagaccgccatcagctctgtctgaccgaatacggctccgttggctctgtatcgaccatcccgagcagcaccatcccagcctccagggggccggtctgaccgcgcatgtgccgccggtcagaccgcccgcttgggccggtcagaccggccagggcatgccggtcagaccgccactatatggccggtctgaccgcccctggtcaggccgaacccagtgaagagtgtgtgtgtgaagaaatgtgtgcaaagtctaaatgcataatgacctaatgtggcaattaaaatcatctctttactaggtcattacccctcttaatagtacggcgaaactaaaaataaactagcaaatttgatcgccctacaccttgatcaattctaaattaaagcgctagttttaccgtcttcttttattcgcttcgcgccatcaaattttaatccattgatagtcatccatgcgcacacatgacgtggacctaacttcaaatattatctcaatagcaacggttagttcacaattagcgcttgtcattaattaccaaaattaactacgggagcctagatgcttcaacataccagactccccgaagaccatattcaccttcaatttctatctttattttgattttatctacttcatggctagatatctcgtgtcatcaccaaatagataaatcaaacttaccgtatatgaaaataacccttttttccttacagtcttatgaaccgagctaataaattcaacatccacactttccgcgtccttaaactaaatataggatattttgagaaaaatcattgttgccttgaatcacccgaagaaactaccaccataaagtttactctcacttttcagttatggtctaactgtatatatctcaactccttacctagtcctagttatatcatgtttccgccagataattccatatgcgacctgactagcttgttgctaccaatctactcgcccttcatacctgtataaactatccatctgtagagtcttcttgcctttctcctagatttgtttacaagttcctacagcgaattgtccatcctctacatcatggttcaatcgtccaagcttcgtcatccaacctgtctattggtctgatcaccctgtcagtccggtccaactgccttgcactcctcgcacctcttcctaccaatagcatcgtcaagttcttctggatgtatcaaattttccatgcacctactatgtcttgaggtcgcttgagtcgtcaaaggagtcggagtctcgatcaaacttatctattctccattcttgggaaaacgctttagaggcgtcgtatgccctcttccccgtcttcttctcttcaccgtttcccctttctctctcacctagtaacgacacgaagcgagccaagtcctcggggccagaggaataagccatcgccgaagaaagcctcgacctcgccggaaccctaactcgccgttggcagcagcggtggctctgggaggagaggtgcgtgggggcagagcagaaggcgccattgtcagagaggatcccgagcttgctgacggcagcaccgcgaggaggaggtgtaatcatcgtcgaagaggaccaagctccgtggcggtggcacctacatcgctcgaagatgcatccatcaccggttagggccccaagctcaccgccagcagcggcacggccacgaggaggcggtgcgctggacagagcttgagatgccatggcctgagagggcctgagctcgccagcgaaggtgaggaggcttgtggcaacgttgagctagcgaggattgttgcacaccacgtgttttttttttgcacataatgtgttcgtgatgttataatctgtattttctgtatgtttcttaaatggatgttgcatttggtttcttcggatgttgtacatattgggtctttattgttgcagtcacatcttgagtgtttcattcaattgaaacattttcgataaagcggtgaaacattcttctgtaaaagatgaaacattaaggaacaatttatgttgaaataattttttttagcaatggaacattgtaacatttcttcaacgtatagtggaacatcgtctttaagatttgtaaatctccggacgtttgatacgtaggcctctccttattcttggtcaacctccccttgcgcactgtccaggttctgtacgagtcggtccagtaccctcgatcctgtttcttgtggaacaaaatttgactcacttccctgtgctcaacacggccagcaggtcaccttctgcacaactccacagctccagcccctatcacatgtgcaaacaccaacgcatgctcctttcatgcaattaattaatcctcgcatgcaagtgtttaattaaccagcatataacgtagtgcatgtgcctcttgctcagttgacttgctcctttctgtgtcttctgtatgtctatcaagcgtatggagtgttatgtcgtgtctctatacgcgacgtcaatgtgtcggctggccgtccataacgcttccacgtgtcttcttgatctaatgcgtcttctgtacatatatcaaagcgtatgcatggagtgttatgttgctacgtatatcaagcgcatggagtgttatgtcatgtctctatacacactgtttgcgcgtcggccacgtcgtccataacgcttccacatgtattttttatccaatgctgaaatcctatgttctggtatatatcacttgttaaagtgtgcagcttaacgcatctaccgagagtcacccatgttatattgggccttctctattacaaactcatccggagtcacaaggtctatacaatcaaaaaactagtcttatatataatgactttaagttatactcccccactatcgattattgatgtggaactaatcatctttcagatggttttcttagaacacgcttttaattttttcctacatgaccaggtaggctggagtaatacgcgtataaacaagtgggccttcacggccgccacgacccgtcaggctttcccccgcgtcgaagcgaacaacgcccaacacacggccggtccggctcccgcggccttggcttttggctccacacctccactccacgactcccacgcgcgcgcgggccgcggcctccccccgcttccgaggccacggtattttatcgtctcgccccctgcaaaaacgcggtcgcacgcccaccttcccccacgtcttcctctctctcccccgtcttcgcctcgcgctcgcgtctccctccctccctccttccgtccagatccgcgtgggctcgaagaagcggcgggcgatccacggcgagcgtcccgcggtcactcccccccgtctccgtccggcatgaatcccgagtagtaaggcctccgatcttccttccttccttccttcgtatgggctttgttgatctcgcgcggctttcacggtgatggttggttggcggggtttgcgcgggctagggagacggatctgagcgggagagcgctggtttggctccctttcgtcgtttggatctggatctggctaggggattcgtttggatttgtggttgtggatgtcgcgcgtgtcttggggcttgttgaggatgcgatgttgttgttgtggtgggttggggggatgggatgtgcggagttagaaaggaatttcggcaatccctcacgctgcatacacacggttatgtgatttctgatggctcatgcttaggagctgggtcgtgggtcataatatttttggaatgggtattggattatgttctaccagaatttagctgcttaaaatgtttcctgaaatgcgtgcctatttatcagcagaagtccatctgctctggacaaaacattgccatatttgcatatcttcaacaagtagttatggtaggcatatggtcctgtactcctgtctggataatagtatattattaactattgaactctctgtgactggtagtagcatagcgcatttcccaatctcccatctgtagccggtgtatgcatgattattccagttactccagttacttttatctgtatatggaaggcaaacttaaacaatataatggtacctgtttggcagcgtatcctatgcacacagctaggtagatgcactcatgcacacgcctatctggagcctttggatcaacatcctacggccaagatttttcgattagccaccagcctcctacttatcttttgtaaaagacccctccataactctcttattccctctagcagtttattttgcaaaaggaaaaagaaaaaaaaatcacccattccattctggatcttagttgtagtcactccccgtctgtccggcatgaatcccgagtagtaaggcctatgatccctcgcctccttccttcctatggttcgtgtgctcttccgtgatctcgctcggtttcgccgtgctggttgttcggtggccacgtttgtgtcgtggctgggtattttggctggatctgagtgggagagcgctggcggatcgctttgcatggttgttggctaggttttcgtgttctaacatgtggttttgacgtgcgcgtgggcgggcggcggctatcgcggtgcgtcctgggggttggggattgttgaggatgtgctcttcattatgacgtttactgggtaacggcatgggcggaattacaaaggggaattcagcaatcacatcatgatttctgatggctcatacatagtactcggtagtgggttatatttggggaatgggaattgtattttattctaccagaatttagtttgaaatgttgcttcatatgtgtgccaatttatcagctgatgtccatatgcactttagttatgtgtaaaacattgccatattttggatttggttatcttcagcaagtactaatagtacgcatattggccccgtttggataatagcatattaacatacattggagcagatgtatgcataattgttcagttgcttttacctgtatatagaagggagtcataaacaatacaatggtctctattgacatttatttctagttcatagcattcatgtcatgatttgatagttatgtatataaagggaagttgacttttgggatttgggaagataatgttttattgtaagtaattcccactactgttggagtatattacatgtgataaaacactatgttgttgaaatgaaggtggcagtcctatgcctgtaattattatttcattttgtctatgtactgctactgtaacactagtttttttgtgtcaatttcagcgactaccttttcaaacttctcctcattggtgattctggtgttgggaaatcgtgcttgcttctcagatttgcggtatgagttaaactcattctcctaattgtgctcttgtactaagttattcaggaatatatagtttcttacatgtggtccatgtaaatgtgcttcagtacaagcatgcagtgtaacaccatataccccactcttgcaatagaaaagtggttatgataattatgcaaggaattccttccattggtcatcttgttgtataaacatgaattgtagatcatgaatccacaattcactcgtatttaataataaagaatcaagtttgaagcttgactaatttttctgttccgtagattgtgaatgttattgatgtacttacctcctgtgattaggatgattcatacctggacagctacatcagcacaattggagttgattttgtaagcaatatattcttgatttactttttgagttaaatttactttgttgtagcacagcaataagttatacattatgtttgcagaaaatacggacagtagagcaggatgggaagaccatcaagcttcaaatcgtaagattactgctaccttttcttcatcgcttttgatcctgtattgtttttacttttgctagacaaattcacaaataaggatgtccagttatgatgctatggttattgtcaatgaatctaggaagatatgttctgaaggttatgttcccatatttgtgaaatattacagaaagatatgctcctatataatttatttttgtaaaaatcacactaacgagggaagagaagtttggaacatgcacaacaccaaggaactcagcctgagtccatttattaccctgaactacaaaactggttatttttttcaaaacattcaaaactggacacataacaccctgaaccatatgttatggtggttgtgatcaaaatggtagtgattttttcttttgctagcatgaattttaattatgtaagtttcatggtggtggacattattaagtgacatttgcatcaagaaaatatgcatattaagagtctgaattaggaaaatcatgtctatttcaaacaaaaccactaacaaattatgtcttagggtgttttttgtctgcttttaaaaggtgagagtgaaaaataatcatttttttgtagtttggggtgaaatagtttgaacaaaaagttcaaagggctaaagctggactttaacccttattgaaatatggatatgatagtatttacccatatttgaatatgtgtttaaatgctgaacgctgtatcgacatctgaactcaattctggcaaaagtatactttataaattaaaacccagaattggattcagatacgggccatagagtgcattggtatgtccatcattgttattgcaaattgtgccactgatgagaaatctttaaatttatttagaaacgattcttttatgagtagcaaactttgagaagtacattaaacttggtgaaatgtgatccatatccatagagtaatctgaagtggagcaacggtccaaatgcatcatgaatttagtatttgaaaacattgatgataagactgtggtatgagtatactcttttactttgttacagtgggatactgctggacaagaacgtttcaggacaattacaagcagctattaccggggagctcatggaattattgtaagttggccacatgatccaaccactattttctgcaatgtattggccatcttgtccccttcataaactaattcatcctatcctgtgcatgcagattgtatatgatgtgacagaccaagaaagcttcaacaatgtgaagcagtggttgaatgaaattgatcgttatgcaagtgacaatgttaacaagctcctcgttgggaacaagagcgacctaactgccaacaaagttgtgtcatctgaaacagctaaggtaagctcttcagaatcatttgatgtactgtgtattggttggctttctcacgatcatcatgcactgtccttattgatacacatttcacatatctacaattgttaaaaatcctgcaggcgtttgctgatgagatgggcatcccattcatggagacaagtgccaagaacgccactaatgtggagcaggcctttatggctatggctgcatccatcaaggacaggtacagcattaaaaatctatccctgagcacatgagcagtgtagctctcgtattaccctgatatccgggtaaattttactcctgtcgtttttctcaggatggcgagccaaccggccgctgcaaatgcaaggccaccgacggtgcagatccgcgggcaacctgtcaaccagaagacgtcgtgctgctcgtcctaaagataacgaagtacttccttctatgtaaaattcgacgtatgttactactgtttgctcactacaacgtatttgtaatattcatttgaacgccctcgatagcatcttttctttaatcagatggttagggagctgcaaatatatatgtaactttgctgtgttgctctttgctcacgaatcaagaggagcaagcagaaccagtgtatttgattcattttacgcttacattttgtcctttctcgcaatctccgttcgtttgcatagaaagtattttctcttgcatggtttagttagactcgaccagattacaaatttacaatttctcacagtgctggaaagttaattgtgcgttggtagattggcagaaacaaattgtctttcgttgggtgatgcttcctgccgttagctgggtcccatatttttctgtctgaactggggtttagcggggtttgcctttattgttgtcttaataagagttaattatgctgttgcatgttggtcaacgaggctatctagcagtagcggtagctgatgtctgtctttcatgtcatcgtatagttatatacggctgtgtttagtttcttttaaactttcaaaaaagtttcttttaaacttccaaaaattccatcacattaaatgtttagacatatgcatggagcattaaatgtggatgaaaaaaatcaattgcacagtttgtatataaattgcgagacaaatcttttgagcctaatgatgctatggtttgataatatggtgcttcagtaaacatttgctaatgatagattaattagacttgatagacggattaattagacttgataaattcacatttgctaatgatagattaattagacttaatagacggattaattagacttgatagattcgtctcacaatttataggtagaatatataatttgttttgttattagtttacgtttaatatgtccgtatactttaaaaaaaattaaaaagaaactaaacacggcctaactcaaagacatctactaccagtactacttataatggttactctggtaaagacgtcaactggtgctatagtagagagattacggaaccctttgaatcgcagggtaaaaaaaacggaggaataggaaaaacacgggaaaaacacaggaatggccgtttgataaacacaggaatggctgtttgattggagcgcaggaaaaacacaggaatcggatgagagagatagactcaaaggaaattttccaagaggttggagttcttgctaaatttcctccaaaatctacatgcaatgtgccattccataggaatttcataggatttagaaagcttcaatcctttgaattaaagagccaaataagaaaatttcctataggatttgaattctatgaaattcctacataaatcctttgatacaaatgggccctacaggttcatagaatatgggcctgttcactttgatgtcattttcaaccttaccaaattttggtaaagttgtcaaaaaagtggctacatttagtttgttgccaaattttagtaaggttttttttggcatcaaagtgaacaggccctatatatcggtacatacccgcaagctgtcttaacagtttttttcccccttagcaatcaacagaagtttgagaacaaccacttgaactgatattgatttaatgccaaactggggcagggtatgatagagtaagctggttaccttatagaaatgagagagctacatcaaaatagaatcaaatactgtatgccgctacctaaaaacaaaataagaaatgatagagctacatcaaaatagaatcaaatactgtatgccgctacctaaaaacaaaatattggcatgttatgcatgtctggggcgtaattgcatagtactaagtccataactcgctgcatgtccgctctgtctctcgcgaggccatgacaagggggaggaaattccttttatcttctttgccatttgcacgttttagggtttctttctttttctttaatggaaccgacgagtttttgcctgcttgaacttttattgatgatataaaaagatgtaagtactactccatccatttcatattataagtcgtttgattttttttctagtcaaattttattatatttgattaagttattgaaaaaattagtttaatagaaaattttttttttattaatttaatagaaaaaattagcaacatctaaaatattaaattagtttcattaaatataagattaaatatgttttgataatatgtttgttttgtgtgaaaataatactatatttttctataaatttaatcaaacttagaaatttaactagaaaaagagtcaaataacttataatatgaaactgatgaagtatctcttgcgccactctaatcctcttcctcctccatatctaatgtctgcgccacgacgagggaagaggatcccttctctctgctttggcttaagtaacttttggggtttctctttttcttcaagtaaactaccgtaagttttgaatgagcttttattgatataaaaagaagtaattataaggtttattgatgtaaaaaggcataattacaaggtagtattagaattacagggtgcgcggaatagaggaaaacaatcatcaaaggttacattcctccctataggcgtttcctaggtaaacaaatcctcccccattggattttacggtttcttctgtataaagttttcaatagatctattagcaagtctataatttatctttcaaggtgtttaaaaagttggatttgcttagagtactctctggtccgatttctctttgttgcggctatctcatttgtaggtcataaatagtcttgtttgttatgttgccgatgttctaatcggcaatgtcatctttagagtttaggtcatcgatttgtttgatgatgctagattgagggcatgagaatgaagataatggtcgatgctcgtttatatacttttacgtgtgcttaagtttattagcattatggttgtgctctcgcatcccttatgacgatgttagatttagaatccctatgttttattttggtagctcttttatagtagtgttgtaaccatctcttttatttaacatgactagtagaatgcccacactttgttacgggattaaaaataaaatcttattgcattgatctagaattattacttccaattcaataataattggattattgaaaacagagtcttattccattgatctaatcccttctggaattactatgatgcactcagaaggctgaagccccccgaataaccagatgacagcacttggattgacctatgaggctatgacccccgctcatcagtgatggtggcagcctcacgtttataatcacggctattctttgggaaaaaaaaaactatgcatgccatgacccaccaccaccgtccatagccgtgcgcgcgcgccgcagcctcacaaagttgaaagtgatgtatgatctgttctcttatacagggtttaggttggctgtgggactggcaaattgttccgtcgatttttgcattgattatacggacattcttagtgtctctccagaattttcacgtggtggttgcactcggcaccacatccggcagccaaccagcagtagtacctgcacattggagcagttgcacagcatcacacgcctccaaattcaacgagcattatcatgccattccagttatggaacgtgcaccggtgagattttttccccgacgcaaagctgacacgacaattcactcctctcgctcgccgcgacgagctttacggaaagttggcccgagtagtggccgtgcccatctttgccggaatccctcagattcgccttcaaagtgccacggcttttttttttccagcgaccacaacaagtgacgtgcacaaatttgacgccgcgacagccacgaaggggaattcaagcacgaggaactcgttgcagaaaaggtgattcagaacatgatccatgaatcgcgggcctgccgggtgctgggtgatggcctgcctgcctgcctggccccacgttggatgagagaaccctgccggtacaggcgaggacaggaggatccgtccaaaacgccggcgtagctaggacagggttctcaaagatggagcaatcgcagctaatggccgtcccatccatcctcttcttctgctactgctccggttagttcccaaaagttttttttttccaaaaacattacgtcgaatctttggacatatacacgaatcattaaataaagagtaaaagaaaaacaaattacacggttaggggggaaatcacgagatgaatcttttgaacctaattaatcaatgattagctataagtgctacagtaactcatatatactaatgacggattaattaggcttaaaagattcgtatcgtggttttcaggtgagttatgaaattagttttttcattcgtgtccgaaaaccccttctgacatccggtcagacatccgatgtgacacccaaaaatttcatttcgcgaactaaacagaccctaccaaaccgtttgaattggagttaacatcacccctcgtgaaaatcgcgcggttattatgaggtatattatggattgaaaaactgaaaatgttacacgtgataactgtgttgttttgtgaaccctgcctctctctccgttgtaaaatactcattgttcaagttaatttagcatagtttaagatgtaagagaaaagattattgtttctcattttagtgatagttagagatagaataggaaagaaatttaaatgagaggtgatggatgaaacaactaatattttaaggtattttagaacggaggaagtcctttatacgagacgatagctactgcatcacgggctttcacgtcgtaaacactggtgaaaacactggttgttagccgggtgaaaccgtttccatgtagcgttgcgtatcggctgcgtcgatcgatcccaattcccagcacttgtccattgatcggtggtgatgtcagtgggggccagggcgaaaagacgattaatacaacttggtccaatggactcaccattgattgattaagtttgcctgcgtaggtggttagcgtacgtggccaactcacccgatcctttttatgtttattgcatgacatcgccagcccgtccaatcacatcaaatctcccggcattgttcacgccatgaaaaatgaacgattggatattatatccccttagtttatttactggctatatatactcctaattgctcatctctgtccaccatggatacgttactgatcagaataaagaaaaaaggaatagattactgattttatttcggggaatagtttactgattggattctcctaattggctacaggcaatctggcatcatgagccaggattcagcagcacgtctctgttggcatctagtagcactctttatttatctgctttaaaataagatgatctagttttatctgatcaagactgtgtgatcgaaatacgcaaaacatgttcagtgctcggggagagagagagaaaagatgaaccatgctccattacaggataccgaactattacctaacttgaaaaggaagttgccacagagatcggacgacaaattttattaaaataaataaaagtgctttataaaaaagggaaaagaacacataacaaataatacactttcttcagaaaatgtctttcaccagcagtagctgattgatcgcccactactacttagtctgtcaaaaccatgtttttcttagaaaaattgcttccaaactaatggtaattaacgtggtcctgatagctactccgaataatcaaacccatataaatttccagttcaaacgcatatgcgttccaaagacaaattttacaagcgaccgtagcctatccccgttcgtacttttgaaagtacttctatataccaaccccggttttttatttgacttaaacccttttgacgttagtcttacaaagtcgatgaatataattggaggtgttcctcaaattatagacaaagatcgatgcttaaacatataattaattaatagtattcctatttcttaaatgcttggatctgctccgatctccatacaaagtcaaaaccaaatagacgagatcagcgtgatcgagctggatgcctggatccaaggtcagggacacacacacggccatgccaggaaggcagaaacacggtggtttgacggagaacttaacaaacgccatttttttatcactaagccggtgtctgtagcatcaatcaattagtcgtcgacactgaatgcaaaacatcatcatgtgtgaatacgactatacagtcgaggccattcaatacttgcttgatgtaaacatttaccaagaccagaaatctgaaatcacatgcgagatcaaattcaaagtcgacttgggcacgtatcgatcggccatgcgatgtgcatgatatgatctcctgtttaagattagctaaatcatgtatgtgcgtgtggacacgtgtgccttgatcaatactaaacgccaggaccgggacttgacgcacgatgcatgccatgagtccaaagacataattttcttttttatgttgagtaatggaactatcggaaaaggtccgactaagtactccctacataaaaaaatctaacctaaaaggtctgcttagccagctcgtctccctatgggaagcaatccaggatattcttctcaatcaaagcgagcccgatcaaatcacctggaagctttcaaaccatgaagaatacccggcctcgtcggcatacaaagcgcaatgcctgggaaccactagcaccaacttcaacgccttaatttggagagcccggcccccaccaaaatgtaaattctacgcgtggcttatgatccaaaacagggtgtggacttcagaccagctagcagctagaggatggccaaacagtgggacgtggcccctttgtcgcgtgagtcagcaagccacattcttgtccattgtagatatactagaaggatttggagcctgactgccgcctaggtggcttaccagcaactagacccgtgccactgggctccatatcagagcgtctaaaattggtgggaaatgctagccaatacaaaggaggtgcccaagaaaggccttcggaccctaattcttttaatagtttgggagatttggaaggaaagaaatcggcgggttttcgaacacaaggagactgcggcaccttatggcaaaaataaaagaggaggcaagaacttggaccatggtgggagcaaagaggctacaggattttctatcaaattgtgtataggccttctcaattttgtacagtttctcttttttttttacccctaggggttatattttgttccctctattttaaatgaaatagcacaatccagtgttgattcccttcaattacttcaattatgccgtttggttatcctttgttgttacgatttggtgttgttatcggtgtccgttggggcggaggagtggagggctctattgttgctggagagtcacgcattcaattcgagaaagttattaagagaataggttgttggaatgaaatatgtctatcaaaaatattttttttcagatttagaaatataactatcaaaagtaggagggattactacgaagtgattattaatcaaactagttcctcatttatgagtattttgtacaggacgcagtagatatatttgcacctataaactttcaaaacgtacgagatatactctctgccaccactggggttgaaattatacgggttttccatggtatatggcagaggttttgacatgttggaggacttctttttccaaggttcaagcgagtggcctaacagtcctagaaaaaaaagagagaaatagcagagggcattatagtggataagtagagatataaaaaatacgacgatagcttttgggttatcagctttatcgagccggactgaacttagaaatcacttaatgatgctcccgtgctttctattagtagtattatactaccattaaaaatgatctgatcctttcattaattattaaggctaaatttgcaagcgaatagattgattaagggtaactatatatatatatatatatatatatatatatatatatatatatatcaacatatggtcatccaatgcgctgacatcactcatattccatcgaaataagccaaaaaaaaagaaaaaaaagtttattcaccactaaatgatgattattacttttcgcactttttttataataatatccctctatgtttctaataccgctatttgaagtgatagtttaagtagatttgaaccctttcaatcgaatgagatcaatggtttagattattttctagtaccagtaaatagcaatatatatatatatatatatatatatatatatatatatatatatatatatatatatatatatatatataccacttggttaccgcaattatcgaagaaacagctagaaagcaatattcattgaccattgccttcgtaaacagtcctgcctcttaaaagtccattgttgacttttggacttctgcaatagttttggttgtgggacattttcccacatatccaagtccacaagcgccaaacaaatccgtacatgaaagcgccgaacgcacggtttctaaaatgcgaattgggaaaaaacggttattccgcataaaagaaaagaacacgtacggtcgtcccaacacccagcgagcctataaaccatatagagattatactttaggtcacatatttttattaaaaattttagtttgaaccatccttgcaacttttttttttcattttggactatatattgttatcaaatgttgcagcttatatcgagtggtcccatataagtgatacgtggacaaataaagtggttaatcccattgacatgtgagccaccaaatctaaagttataatatttgcaaaaataactggttcaaagcgaaaaaaaataattcgtgagtgacaaaaataaaactttaacaaaaaatatatggttcaaaattcaatttacaatatagggtgtgacagtttgaaacgacgcaaatcgagtcaagccacaaatctccaagttactactagcatagcatagcaaggtgaaggtgccatgccagtatgccaccgcgtatactcgcgtcacccggctgtaacgttggactcggaacctgcggctggctggctggctggatcggcgaaaacgatccacgctgtcacacgctcgaagacccggaaaagtcttcttgcgcgcaccgcggttgccctcccgggcgcgcgaccgcggtggggcggtgggctaccagcatgcagctcctcgctcccaaatcccccgcgacgtagggcaccggtgaccccgtcccacatccagccaaccacttgctcgttccgtagtggtgccgtggcggcctcttctccccccttctcgctataaaagagccaccacgccgagagcccatcttgtagtcatctctcgctcgcacacaactaataaccaacgaaaccacgagcagcggctgatcggtaagcggtagtggtagtagtagtttcgtttgtacgttgacccaagcagcagatgccaattgcagcagccgcggtcacctcgccaccggccgccgcgcaggtgcacggtgtcgtgccaaggcatgcctcgccgacgccacagcagcgggcggcgccgcggcgggagcagtcgccgctgaacccgagctcgcagtcgatccggtcggcctcctccggcaccgagctcgcaggttccgcggcgacggaggcctcccgggcgcacatcgccaaccttgaccgggttctcgggaagccaccgcaggtgccgaggccggcgagccacgcggcggcgagcaagcaggagcggcagcagcaggacggggagctggagccgctcaacgtcaggcacggcctgctcaacgcgctcaacctgtccttcttcgtgcccatgcccgggatgcgggcccgcaccgccgccgacgagcacatgtcgcctcgcagcctcatgcacatgcagcagctcctctccgccgactccccgcgcgcctcgccgaggagcaccatcgcgccgcgctggcgcagcctccacggggaagacggctgggccggcctcctcgacccgctcgactccgacctccgccgcgagctcctccgctacggcgacttcgtccaggcggcgtaccaggcgttccactcgctgcccaccgcgtcggcgaggcaccgcgggctcatgctccccgaccgctcctaccgcccgacgcggagcctcttcgccacctcggcgctgtccatgccgccgtgggcgaagcgccccaacacccccgagtggctcacgcagcagtccaactggatcggatacgtcgccgtgtgcgagtccgagcgggaggtcgcccgcatgggccgccgcgacatcgccatcgtgctgcgcgggacggccacctgcctcgagtgggcggagaacctgcgcgcctcgctcgtgcctctcgacggcgagagcggcgaaggcggcgggcaggaggagcccaaggtggcacggggattccggagcctgtacaagacggcaggggagaaggtgaagagcctctcggaggaggtcatgggcgaggtgcggcggctcatggagaagtacaagggcgaggagctcagcatcacggtcgtcggccacagcctcggcggcgccctggcgctcctcgtggccgacgagatcgccaccaccgtccccgacgcgccgcccgtcgccgtggtctccttcggcgggcccaaggtcgggaacgccgcgttcgtggacaagctccagaagaacggcagggtgaacgtcctgcgcatcgtcaacgccggcgacatggtcaccaaggtgcccggcgtggcgccgcgcctgccgctcaccaaggagcagtaccagcacgtcggcgcggagctgcgcatcgacagcaagaactcgccgtgcctccgccccgacgccggcccggcgtgccgccacgacctggaggcgtacctgcacctcatcgacgggttcacggggacgggccgcccgttccggcacgacgcgcgccgcagcgtgatccggctgctgcagttgcagagggggaacgtgaagaaggagtacgtgaaccgcgcccgggagctcggcgtcgacccctcggcgccggtggacgtcggccggagcatggcgtacgggaactgcgccgtcgcgagcccctcctcgtgagacgacgagattgacgtcttcttccaagagcccttaattatgtaaatttttgtagaagcagaccaacaattctttcgttagtcaggggtgtcagcgggaaaaaagattttcccttgtcatttgacgtatgtatgtacagtacataaaaactattatacttgcaaaaaaaaggaaaaacattatgcaagtgaaagcttgttatatctttatcactgaaaactactccattgactgctaagcccttctttgttttttactcaaagagaagtacaatctcttgtcactgaaaattattgactgcttcccttctttgttttttaccaagacaaggtagtaaaactagaaacggtcaaagctttgcccggcaagtagcctcgtcttccactatcaacgtctttcagaaacatcaacaggagaaaaatgttgaatgctcgtgcagttccaagcttaagcacttggtgactgttcatgtgtgatgtgtcgtgtcttacgtgtaccgttggatgcatctccagctgcagccaacaaactcacccgcatccgcatgagcagcgcgcatcgccgtgttcttcacttcttcccatccgtccacttccacaatgcggcgcctcctcgccgcctccggccgctgcgctccggcgacccgcacccaccatgggctcttcgcgcgcgccatccagatcttggcgccgccggatcccgtcagtctccacaagctctcggcacccgactgcggttcgtgaatcttcaccctttttttttttagggttgctgtaaattcgccctcttctcctccaaaatctatcgccgtaattccggtcacaactcacaaaacatcgaaacagggagagggggtattttgcaaaacctatagggggtattctgcagaaatttggatcgctgccattaatatcgatcggaaggaggggctgttccgcaaaatatgttaccatcggagcactcgatgggtcgggtcgccggcggtcggcacggcacccctctcctctccggccgccgccaggcacggcctcctcccgcgcggcagctccctctcgtgctctcaggtcagcgccgccatctcctgacgcggcgtgggtgccgatcccccgcttcgctttgtatctcctcggttcccggccgggcggaatcggcgactcggcgtggcgtcggcgaggccctggaacagtggagcggtacaaggaggtaggtcaggggcttgggagacgctgtactttgctgcaaagccatccacttcttgatcccttccagcagtagccagtagccactcaattcacaatatgtctttagtagtactgcagaggtcccttcaattatctctgatggggtgtgtgatgctacccagtgatagcaacaatgtcgatgtgcaaaagacagggtctattaaggactgttaaagattgtcctctcatgtcttgtctactactaatcttctgatgattctgttaacccggggatcagcatggcttttagcctttgcctaaattttctgaagaatccttttttttttctgaaagagttgctctaaaaattctcccttgttgcggttcctaaatttgtgggtggaaacagaaatcgtagagctgaggctggagcgtccggaggtcaagaacgccatcaactgggaagccatgaggctgctgcggggtgtggtcgagaaggttgaggctgacgacaccgtgaaggtcgtcctggtcacgagctccgtgcctggagttttctgcgcaggcgccgatctcaaggtctctgtctattctactacttggaaatgcaagcatgtgttttcatacttcatattttaatacagatcgattagagcgtttcgcatttgagtagaatggctgtgagaacagttgagatgcaactgcgaattctgaacgatcaaagacattggagtagctcagtagctgtggaaaaactgcaggagtaagaaatatggatccatgagcttggtgtagtgctgaaaacgaaattcatagaaagaaatactgtgatggcgtgtcacgaagaaaatgattcatggagaaaatgaaatatcatgattgcgatcctgggacagcatatggaggagtcactatctcaaagaacatactataagagaaaaggaggatgtcatgctttaaacaaaggattaaaaattggggtcaattactagttggggctgtgttctagagaggaatagctgcttaaccagacagatcattttaagctttaaaacttggtactagaagttaatataagtcatcttgcacagtccagatgatattgatttctcaaccaatttatttgacttctcgtacttgtagttgccattaaaccaaatattgacctctagactagttaaagaaccaaaaccatctcatggactatattaaaatcatgagatgatgttaacaaaaacatgttatactgttcctacatgttgttttttgttgcttacaaatttacaatccacatggctaagataacagagcaacagttcatgacaggaacggaaactaatgagctcttctggagttagagaatatgcaaattccttgagatctacattctcatcctttgaggtctgtatttattcagaatttacctttttttttgttggcatccaccctcgagtggaccagtgtttttatgagaaactatgcccattaatttcagatcctatacatggcgcatttttctttatgtgtatataaaaaccacatcttgttttttcaggcactatctattccaacaattgctgtcattgaaggagctgctttgggtggtgggctagaactggcactttcatgcgacctgcgtatatgtggtgcttccttttgtcttagtatatgagcaattcaatatttcccatcttatggacataatcattgttcctttctttcaaatttttgaaataatgtgttcacccctccaggagaaaatgcaactcttggactgccagagacaggacttgctatcattcctgggtatgcatctagtactccatacttttgtacataggtttctcgtgaaattgtcaagatgatccgaaactaaatggaatatgcacttacctaccagaataaggcaggtcttcatactttagaatttcccatcttaatgcaatctgtttacatcaaagtccaacacccagaaaagatttcattttgctcaaaaagaaaattaattagtggagctaatgttcatattaaatattactgacaagaatttctgtcttaatggtagtatttgcttatgcttggcaatgaaaagataatctgatccactaggagaaatataataaaaaaaatcagtgggtaatgtactaatgttcttttaggttagcactaaaattgtagagagtcgatcattgtgcacttgtgagtgctattgctagctccagattcaggatgacccactcatcattatttccaatacctcttttagtcaacatataaacgattctttacgttgacaaaaataaataaataaataaattacagtccaaaatgtgtttcttcaatgaaaatattcagcttgagcagataatcttcatcttttactgtactacgtagagctgggggcacacagcgtcttcctaggattgttggaaggtccagagcgaaggagatgatattcaccggccgtagatgtaatgcaactgaagctgtaatgatgggtaagagttcccttacgctttccttctattatcttcacttgcatttcttcaaatgaggtttaattggatgtttgaaacgcaggactcgcaaactactgcgttccagcaggggaggctcatgaaaaagcccttgaacttgcccgcgagatagcccagaaagtaagaaccatatcgtcggctttgaacacaggactgttcaaataaaacagaagccacaattttggccatatgaagatcttgaccaaacacatacagtgtgctgtgacaatacgaggtctttttccaatctgtagcttttttctgaatcctgttattttcttccaggggcctctggggataagaatggccaagaaggccattgatcaagggatgcaggcagcagacatgccgtccgcgttggccgtcgaaggggagtgctacgagcagctgctgcacacggaggatcgccttgagggcctagccgcattcgccgagaggaggaaacctgtatactcaggaaagtagtttatctgtgtatacagtatactgccatttggtgtcgtggtgatcatcttcgcttgcccgttcccggtgactttagtcgagagtaaataaagaagtttgtgtcgatgaattctcctgcacttgcctaggtaggttcgagacaagaagcccaactcttgtaattctcgtggcttgttgggctcagcggaccaaccttcctgggctggcctgtaggcccacccgaggcttcctgggcctcacccttgccggcagggcgctgccagccgaatttttttcatttttaaattttttcttttaatatttacagaaataatccatcggcgcaaaaaattacaaaaatagaccctgccgccctctactaaggcggcaagctgacgtggcaaatgggggagggacgggtggtgacggcagacgggagagacgggagagggaggtttttttttttgcacgaaaacccttgccgccctatgttatggcggcaaggggctcccatgcaaaaaaaaaagccaacccgggcctaatactttttggctggtacctagatgcaaaaagtaccagccaaatgctctttagggctgcgaaaattgcatttagccttgggcggcaaggggctaaatgcaattttcgcagatggcagcagatggcgccgtcgagccgacatctgccacgtcaacttggagggcggcagggtttatttttgtaatttttttgcgtcgatagattatttctttaaatattaaaagaaaaaaattaaaaaatgaaaaaaattcgctgccagcctgccacatcttagtcaccggctcagcctcaagctggctcgagcccgtcaatgagccgagccgagctgctgttttacctcgtttctccaaccgagctgagccgcccttctagcgagccttttacgctcggctcgtttccacactcacagtcccacacgactcctccggtcctcccatcctgacccaaccgctgctgctccagcatgcgcatcctccggggaatcctcgccgtctccggccacctcgccggccgccgcgcgccggcgaacaacgcccacctggcactcttctcccgcgccctccaaatcctcgcccagcaggagcccgtccgcctccagaagctctcggcgcccgactccggtccgtcccttgctcgcttctcctgtcattttttttttttttgccttcctcttttggggtttgtggtttattacagctgcgatgattggactcagggatcgtggagatgaggctggagcggccggaggccaggaacgccatcgggagggagatgctccaggggttgcggagcgcgatcgagaaggtgaaggctgacgcgacggcgaaagtcgtgctgctggcgagctccgtcccgaaggttttctgcgctggcgctgatctcaaggtgaacgctctatcagttcctctgctaaatctcgataggttttctgctcacagtaggataaggattaaggattatatgtttgtggcatactctagctaagcagttgttagaagagtctgaaagtagataaggattggttcactgttttttttttttttggcaaggttggtatgtttcaattttgagttaatgtgatgttttaattgagtgttctaattttaagggagtagttgaatcgatctggaaaactgatgattgacgtactcattactcaacatgatcaggagcttcaaacatcaatcaaggcttaaatgagttgtgacagcattgagaagctagtccctcaaaaaatatcggatggagagaaacaaatggattggcaccgttgtttcaatctttttatcaacaagtttggaagggttaatagcagtagcagggtccgacttattaagagggatatgtatatatgtcctcaattcctcatatacgttaagacttactagatggatggttgaaatgctggttactggctagctatggtcagtaagtacaagtgtacacaccaactaatcaaagtgtccttgtgcagatggtattgattgaagaagtttgtttgaattattgagcatttgaaataagtgctatccaccacggcgtagataacttttgtgtcagttatggaactaaaagcattgtagctatagtataggaaaaaaatggtgaatgctttgtaagtacttatgtccctttgtcctttgctgatcataaacaaaatcataaccgttgtacataaattgttgacaggaaaggaggttaatgagcccttgcgaagttcgcgaatttgtcaattccctaagatctacattcctgtcctttgaggtttgcttctgggtgcatgattcaaatatattttgctaacatccattgtatcttagtagattttagtgaagcaatatatggtactcgcggttcaaattataagtagttatgcacgctcatctttcgcattctagctattttttttctaaagccttgatgcaagttttatttttagagtatgttgagaatacttacaaaatgcatcttgcacaactaggcattgtcaattcctacaattgccattgttgagggagctgcttttggcggtgggttagaattggctctttcttgtgatctccgtatatgtggtactctttcaacctgcagtgatcaattgatcatattccatccatcttatcaaagagttttgttccttccttccaaaactcaaacatttcaatgcttgtgttttcaggggaaaatgcaacatttagcttgccagaaactggccttgctattattcctgggtatgtgttcaagatggcgctttacttttgtaagtaatttttataaatgtagctggcactttattaaataacatgggagtattgtttggcttgtaaatctagtcatttaccttgcgtcaaaaaaaatctagtcatttacccaccagtatatgccaaacctgttcccttttttttcacagttctcttgctctagtgcagcaaccccgtgtatcatatcaaagtgggaaattgcatcctatcgaaaagtttgttatgctgttctattgtacttgaatagcatatcatagtggaactagtttgatttttgttgaaatgtctcaagcaaaatggtgtgcttctgctgttaacatcactttgtaacaatctatagagctgggggaacgcagcgtcttcctaggattgttggaaagtccagagcaaaggaattaatattcactggtcgtagattcgatgcagtagaagctgtaaccatgggtaaggttggcctggcgccttcttttttgagaggagtcttgttacattttatttctacaggtgtgatttcttagtaaaagcttatatgacttcttagaagaaccactacgacatgtatgttttcattgcaggagtagtaaactactgtgttcccgctggggaggcttataaaagggctcttgaacttgcccaggagataaatcagaaagtaagaggcttctgaatgagtaacatgttatatttgatctgtttgagatgttcatgatctctgatagagcagcttctacaaatgataatgaactttctgaatcaaattcaacaagatcactgttctgtccgttcttgtagacgatctaagcaccatttgttctttcagggtccgttagcgataagaatggctaagaaggccatcaatcaaggcatggaggtagatctgtccgccggattggctgtcgaagaagaatgctacgagcaagttctgcacactcaagatcgtcttgaaggtctagctgcatttgctgagaaaaggaaacctgtatacacagggaaataaggttgtaaatggtgttaaaattgcaagttgctttcaattgagcttctcacatccagaagggttgagcaggttatttttagactttctactgtgttcatatctttctccatacatgtaagaagaacaagatacatctgccaattcatgctacattttatcaagttaataaggttacacatgttctctgcactgcaatatgaaaactgcagcaaatctacttttagaccgccttatttatccttgaaaagcattagtggcttgtaaagatgttgcagttttgtcatgtcattgtacccttgtcttgctggctacaaaagggcagcacaaagaacactttttgacgactaatgggtaacacaaaggagcctacctgttagcctccttccggcttattagtagtattgtacaatccattggccggcatcaccttttgcttgtctagaactcaggcctgcttacacagattggagtagtgtcttgcacctttttcaaaagtccatttctttcctccatgcatgccaaacaagccctaacattacaatgcacaaattaaaaactgatgcttggagaaggacatacacaaatactgaatcgatgtagatattgaatatttgatgtttggggaggacatggggatgataaaagcatagcgtgaggagagagcttgctgctcactctgccggtttgtgctaaagaatactggtcttggtaaagcaaagaaacaaagtgaaaaaagaagagtgcatatcagaggcttttcagattgaatttcaggcaaaaagggaagaaaatggtagaatatgagaggtgtgggtaaaatcaagtgaataattagcaataccaaatctcccaacattatatctgatggtgtcaaatagtcatttttttccctctcgtaaagattcagggactaagtgtccgcagtggacaaattgtaacaggtacgctcttgatctcctcggtcactgaacaaacactgtacaatgacactttcagatacaaatcagacaatgaacaaacatgtgaaacagattaaaaagggaagtatcagggagagctctaagctggcgtcaagttagttaattggtcaaggagtataattgtttaactacatgccccaaattacagggaaaaaacaaaaagagcaaaggtaaaatatcccggctaaaaacaggcaaagcaaaaatgataaaagaatatgaatgtgctgttcgagagactgccaggcctgtctgccatgcaagtcggccatgatgactgatgagctttggaaggcaaaacacaccaagcatgcaagtctagagctcttctctctccctctctctctctctcatggcggtggctggtaaagcaaagcagagagacgagtcaccttcagattctcacatgctttgatctggccgaagcaaccaggcatcattccgttccactcatgccactgatgagcgcgatggacggacggacgcctcacgaagaccagaagctcttgggtctctcagctgctgcaactttccccgattccaatggctatagatcatggcatggccagggagcagcagccagaaacacacgccatgttcttcatgtcaagaacctgtcaggcacaagagagcgagagtgagtggccctgctgctgctgcatggggccattgattgattattgcttctgcaggggtaatcccgatggttaacagttttggtctgatataatgggggtccagctgatagtagttagtaatactagtattaggatcttcagcagcagagttaatcatcatcatttctaccttgtgatcctcctcctccctcgatcatttctctgttccttgacagattgcgtgatgctttccatagagccatgagctaggatcaaactatcagatggtcagaactcagaaaggatgcgtgcagaaatcctccggtggttttaccgaaagatttgaaagctgcaaaccggaagccctggttgctgctgcaacactgaggctttcagctgtgcgtggtgaagacctgagaggctgagaccggtggacaggaggattatgcagtagtaatctgcatgcatggcatatggcatctggcactgcatgccattcagctcaatcagttccaagcactatgtaatggtgtttagtttcagggctatctagtactagtacacactgccttttgtaacgtgacacatcatcagtagaacgcaggaaaaaatgccacatcaacacatccattggtattacacggagataactttttttttttgaaacacggtgtagatacggacgctcgtataaacacatgtacgctcagacaacagatttgttagtacttagtacactcgcataactgcacaagtacatgtagataggcaaactactcacagcgagaaagcgatttggagccacaaagcatcagcgtttaatgggtttgcttccgctgccgtgaaaggatggtgacatgtggggctcccttggccctggagagccaggcatgtaggcccagcgtccttggccggtagtagtaggaagcatgcagttatcagttcacctcgcagtagtaatagtcctagtacgcattcttaataatgggtgtaaaaaaaagattaatgacttaatgttctcccgtcctaaaaataaataaatataggattaatcccaaaaaaatgttataggattaatgtaatatattataatacaattaatctgtacagagatatgtctatattcgtgatactaagattagtactaaaggctaattcttctatgggatagagggattaataatttggaatagtctctataataaacgttgtaatatccttttctcctttactaataatcataatactaccttttaatagatgacgccattgactttttctcacatgtttgaccattcgtcttattcaaaatttttatacaaatgtataagatataaatcacacttaaagtactatgaatgataaaacaactcataacaaaaaatttacgtaattataatttattttgttatgagttgttttatcattcatagtactttaagtgtgatttatatcttatacatttgtataaaaattttgaataagacgaatggtcaaacatgcgaaaaaaagtcaacggcgtcatctattaaaaaatgagagagtataatctactccctccgtcctaaaaaaaaggcaaaccctgggtttccgtgtctaacgtttgaccgtccgccttatatgaaattttttataattagtactttcattgttgctaaatgataaaacatgattaatactttatgcatggcttgtctttttaattttttcataatttttttaaataagacggacggtggggtttgccatttttttttgatgaagagggatagcgaaagataggcagatagcacgtgataaaaatgtgtcccgtatcaaacaaaaaccaattcctatggaagaaaaaagagagagagaaaactcccacgttgaaaaagacctcaagttattatcactgtttctctcactctctcgtgatactgcagtagcctttttccattttgttcctcgctggagtagtaaattttcatttcctttaaattttgttgttttgccccccacacctcctccccactcccccacttctcagttcgtcggctccaccgttccacgactcgcgtttgctttcccttcttcccacttcgatctcctcgaatcacgcggtgcggaagtacgtggtgcgagtgggaggtgaggtcgctcgggaagtagcagtatatcaggggggaggggcgaggcttgactggagaatggctgggagacagagagactgaactgagctcaagccgctccgggatctccatcttgagttatccaaggtgagttttcttttccccctcttggtcaggctcgttcaggtttcttgggaaagtagaaatatttgctgttcggttatgtgcgcgaagatattaaatgtgcttagttttgcttttaggattttaggattcgataaacttttggtctagttccagtggattagagttccattcacaaatccatgtccaatttggcgtgttaagctgattattgtgcatttctctgcagaactgagagtgctcccggctcctacatttgccctctttgggcaccaataattggaggagcaggctgtggattcttgatttcttggtggctggaatcctttcaattacagacaagttgcaggttgcttcaggttcttgaaattgtaatttggttggttgcctgcggtccctacttcctggagctttgcttatttctaagaatcttttaatgctcaaaactgcttcaatttcattattttgggagagtaatcacctcagtggttgagcgctggtgatgctaaagttggatgatggaggtagctgataagattgtggagccaaagggccctttggtggccactgctcagctgccaaataatgtagagttgctcaaatcagttgtgctgaatccatcaagggaagggggaagctcacaagagcagtatgagaaggatctgttggcagaaggtgaggagagttttcggagcgaggagtcatctgacgagggtggccggagttcattctccggggtgagccaccctccggagccaattgatgtggatcttatgagcacggtgtatgtcgcgatcgacgaggagaagcctgagccacccgagtgcttgatgcgaggcctatcggtcaaaggagcatctatggaggacctctcagtccatgccatggatgcaaagccggatgtgattgtttgcacagttaatgtcaatggtttggttgaagagaggaaggtgcactgtgctgtggtagcaccagatgctgttgaagccgtatcctcaactcaggcctcggaggagaaggattgcgtctgggatgcctccttccctcccagtggcaatgtcagcccacacagtagcagtgacagcactggtgcggtcgctgccacaagcatcaggggaagatccacaagcacatgtagaagtggagttctaactagtgaatccatccttaccgtggagaagacatgtgagagcgcaaaggatagcacccgaggcaactcaatggaaagcacaaagaccagcatgagtcgagcgagtgatagtagtggcgttagcgatgacagcaactggagtaacatcacaggaagtgctaacaagcctcacaagggcaatgatcctagatggagggctattctagctgtccggggtcggggcaatgtccttgggatgagccattttagattgctcaagcgtcttggctgtggtgacattggcagcgtctacctctcagagttgagtgggacaaggtgctactttgcgatgaaagtaatggacaaggcgtccttagcaagccgaaagaagttgaacagagctcaaactgaaagggaaattctgcagcttttggatcacccattccttccaactctgtacacacactttgagactgacaggttctcatgtctggtcatggaattctgtccgggtggtgatctgcacactctgcggcaacggcagccacgaaagcatttctctgaatatgcagcaaggtgaatttcttgagcaaatttgcctatgattctatgccatttatcttgacatgttagttagcactcctttaatgttggtattcaaattcaatgccatcttaacaacagttgtacccatgatacattaattttcttgaactattaattgtttttttagtgatggatatttgagaaattggcctgctgaaatattctctccagactaacagccatggagtacagtactacagtatttatgaacacagggtccctgatgtttacacatcaatctgcattgattgggacatagtatgcaatagtacatgcagtatagttttggcatccgatggcatgacaatttagaatgcacagctgtgttcttctgcttggtaacttcttgtgttgcaaacttgcaataactgctagtaataatgcttagcatatactctgattcttgtcatcttctttaaccatcccatagtactgtctgctagttgaagtactgataggaattggaatgtgcaaaactgatcaggttttacgccgctgaggtgctcctagctctggagtacctgcacatgctgggcgtcgtctaccgggacctgaagccggagaacgtcctggtgcgcgatgacggccacatcatgctctccgacttcgacctctctctgcggtgcgcggtgtcgccgacgctcatcagagcgtcggcgtccgactccgatcccaggagagccggcggttcgttctgcgtgcagcctgcttgcatggagccttcttcggtgtgcatccagccggcgtgcttcatgcccaagctgttcggccagaggagcaagaagcagggccggaggccgaggtccgagttggggcagggcggtggcgccgccctgccggagctcgtcgccgagccgacgtcggcgcggtcaatgtccttcgtggggacgcacgagtacctggcgccggagatcatcaagggggaaggccacggcagcgccgtggactggtggacgttcggcatcttcctccacgagctcctctacggcaagacgccgttcaaggggtcgggcaaccgcgccacgctgttcaacgtggtcgggcagcagctgcggttcccggagtcgccgtcgacgagctacgccgggagggacctcatcaggggcctcctggtgaaagagccgcagcagcggctcggcgtgaagcgtggcgccgccgagatcaagcagcaccccttcttcgagggcgtcaactgggcgctcatccggtgcagcacgcctcccgaggtgcccaggcatgtcgaggccgagctgccggccaagtacggcgtggccgagccggtggcgagcggcggcggaggcggcaagagggtggtcggcgccgaggtcaggtccggcgggaaatacctcgacttcgaattcttttagattatgaatgagttgctgaatgcccagtctcactagtgtgtgcattttaggtgtggtgtctcattgtagttttgcatgcagtgttccttcctggatcaatgtaaccagtgttagatttagcgcgattttagtgcgcaatgtatccaacactctggaacccagggaaagaaataaatcagaacaatggatttctccaaattatctcactgaattataacagtacaatgagcaagcgcatgcaccagcaggcagcaatgggcaatcttgccatctgttacactgtgataatctttacatgaccattttgtttggaagtacatcttatgtgttcatattctaagagtaccatgtcagctaacttgttacactagttttgtcccccccccccctcccccaacacacccacccacacctcgcaactccaaaccagagaaaatggaaggagtagagcaataagttatagctcgatattgttacacaaatgtgcatacatacaccaaataaatgacgattcaagcctaatctctggtggaatctccaggcaaccgctcatagagccgatatatcagccgcgattttgtcatctgaggttccctctcgaggacacatattacatccttcatagaaatagttctttgtggtccttttggatgagacgctgcaaatggacccctgccttgcctgttcatgcctcctgcaatagcaatatgacatggatactgaagttgcagctttttctagcataatatgaaagggcggaaaataaatcaatgcaaggttgctgatttaccagttccaaacgctgcagaatgggtcctcttcgaagcttcgtggtgatctgtgggacctttcccagccatatgcgacctggaagctgtcccgcgctgtgaagaagcagccagatcaaggccttcgcgtttctgtctagcttgttcagccatcagttgccatttggacagcatatcacttcctccaacagcctgtcgggcggcaacatttgcagctgttgttctcatcttgtcatcttcttctttgttgggctacaggtcaagcatattaggaaaacaagggctgccaccaaacctaaatatcacattagtaaagttacctttgcattctttgaacgagtttcctccttttccttgtctaattccacagtgccaccgccgtcaacctgtgtgtaaggatatggttaattagaatgactaactgcaacatcgcaacttgatggacctttcgtaaccataaaaaatgtatgatcttcaacagtgagaagacaaagaaatctgctacagtcccttttcatgtgaagctgcttataaactgtttcgtgtcaaaattgaaaatagaaatatattaattaaatcgttcagttttcctttgggataagttgtacaggagagtgtgggatgtgtgcggggtaggcatgcatgtgtgtgtgtgtgagagagagagagagagagagagaggtgtttagatatttcagtataaaaatggataaaagaacaacaaataataatttaggacttaggacagcataaaggtagtgataaataactgaagatgatgtgccatagtaataacatgatagttcaacggaacaagcatgtcatgcaaaattgtacacaagcaaataacatagatattatggaacacctcattttgtttcttgttcttgtctgtttcctctgcttgttttttatcccattcttccttagctttctggttcatccgcaaaatttgccggccaacatctgatgttataactagttgatggccagacttttctgtgtcaattctctagcaataagaaaatcatggttagtacatcaaaataacaacaataccataaatttagtaattgaatgttgtgtaaaataacctgctttgaaactcttatgagagtactgataaatcttcgcaatcgctcctccacgcactgaaggcatttatgttagatatactgcattactctgaaaaaattcttaaggacaatcatatgaatagctcaccattgataaacaatgctcaacatcaccaccaatgctcttcaaattgcatttaggaactgtgaaaaatgtttcatcagttagtattgcttcgatagtatatattgccatgtaatattgttttacagtgtcaatatgaaattccaaggtcctaaccgattgctgctagtttcttcagaagtgggcctttctgcagaaaaagcttgccatcttcttcctgtgcaattttccttgcttcttctgaggcccagctctcttcctttggggcagagagtagctgttcttcttcttcctgttaaagtaaaacagtgatggaatataaagaggatatacaaaaataaaacaaacatcaaatgagaatcatagagggagatgcgtaccctaagattaacaccactaacagccgtgacatcatttagttgatcgaagctttgttcttggaaggttccagaagtcttctgctttttgctagtgacaaaaaggaaatcaccttaggattatccaaaaattgaatgtactgaacaatctgctaatgaaagagcatatggggtgaaatgaactacaaaaacctaggagggggtggtgtagagcctgatgtttccaatgacttcttctgcccagcagttttcttgttactctttgcagcgggaggtgtggaaaagttaggggggccctgacagtccagtcagataattatacgtacagctacatgtgagaaggcatataatagtttcatggttgctgtgaacctattgaagtatgcatgcatagccatacaactggaaatcaaccaaatacactttcagccattttctgactaaatcacatgttactcctcagaaataaggccttcacaaaattattttcataggataataaggccttcacaaaaaaaaaagcactcaagccatcacctggttgaccaggatgcagcagaaagtagaggaaactggagtgaaatagattgagaaaagagaaatggcagaaaaacaaagatcccaaaagttgtgactaatgtttagccctctccatgaaccaatcccccatcccctattttttgtgtcaggtgttaaggccctgtccagacacagggacccaggtgaggtgtcagatggtggggcaagtggccactacttagtaaacaccttgataacaatgaaataaccctgcatgtaacagcgggatgtactacagatggccacattctcaaaatgataagagtggtcgtatgagcaaataaaaagggcaattactgagtgaatttgtatgcaacttagtgtaacagcaaaaattaaaacttcaaaacagtggaggttctctgttctggtactacatatttccattcctccaagatattgatacaatcaagtgcaggctatcctaggtaagtttgatcaatcttctacctgaagaattatggcatcagatctcactaacattgatcatttccgtttattatggcgttcatcaaaattaattgtgttgagtccaacaaaaactaattgtgatggaatgcaaataaacttgtaggaatttttttatgcatgtaactatccctttgtaacatggggaattgcataaatgaaaattattggtaattcagactatttagatggatcgaggaattgggttgcatatgaatctggaaatttgatttgaatatatcataagacagataggtgagatgatgcaggaattgaattacctgcttcccttgcgatttcgttgaagaacctccagtgccaactgcacgacccttacctgtccccgaatcttgctttgcattactccttggattagaagcattagtcttcacatccttgttctgttgcatttgctgcgcagctgcattttgttgtgtcattggatgagaaggaagaatctccatttttgcaggatgagaggaaggccttatttctgattctgaactcagtgagctaagaggtgttgaaccaccgattggcctagtgtatggctggtcagggcgattagttgttccatatatttgctgtgaggcttgctggacttgtgtgggttgctgctgtttgttcattgtttgtgcagaaattgctgagttcataacaggaggtcggttcggcgtaacatgcattccctttgcatctggccgttggatggaattatcatgagcagtcatactgctctgcacctgagtgccagattgcacaaaggtttgggatgaagacaatgcttggtttttttggccctgattaggtgtggtggacacgtgaacttgctgatcatgtaattgagctgaaccgctggaagatacttgggattgtaaagaatactgatttgcattagcctgctgatttgcatttgcctggccacttctctgtgcctgggcttgcatctgaaaacaaattaaataaagatatttcctactcagtgatctctcgtccaacatgacaattaagagtgacttcactttcatcaaacttgattgatatttattaaacagttatcagggaaacaaatggcagcaatgaagttaacacaatccgttcacctgtgcaaaaactttatgggctgcttgctttagcatttgatctccaacgatgttcctgataactctcaagaaatcatctttatgaacttcattacgctacaaacatagaatggtacagctgagttagtttcatttcagtggaaatggtgcaaactccattttaaatgatgaggcatctttgctagcattcatttatctcaccctccccccccccaaaaaaaaaaagaaaaaaaaagatcccaggcgcctcttttattcaaatggattaaaaatggcaataattggctaggcttttgtttggtttactaccaaagttgcatttatgtagtgtactaagcgaaataatttggcaatgccaattttttggccacaaaccaaatagatgtctttcttttggcttggttgggttcggccacaaaccaaacacgccctaagtcctaattttagcaacaaattttagaagtctaacaacgatattaacaacatagaggatatataactttgaacaaattaatagatgtgcgaagcaggttaactttgctccccacttcgcctcaacaaggctgtgtagtttccctagccaatcaaattgatgaaaaacagcagctaacaacagaggagtgagacaaaagcgcaccctaagttttgcccacacagtttgaagctgcatatccttgtctctgtcaagatgagcctgtaggattggaatcaacatattaaatggtatagacggttggtatccccgcttccttgcgtcctgtgcaccaggtggtgcttgctgaccgaccatctgttttacatgctgctgctctcctgaagtctgacccacatccaccttggggcctgtgaaattctgtagaccagcatagcctgtttccttttcagcgaactggaagctgtttggctctgcctgtttcagatggttttcagaatgtggtggttcttgttctggctggtgatcgtgttccgttaattgggtagacattattttccaaaccttcagttaacgattttggctgagacaactggcctgctaaaatcatatgttgctgcactgcttgttggtttgcctggccatttccttcctgctcttctgcttgcacctgaccaactatagattttgacacatcactgctattctggggtaaagtacctgaaatgcaaaaatggagattattcatgtaccctcaacaagaaaatggggtgatcacaatattcaaaagatatgatatgtgaagtccataggaacagcaacctgcaagtaaaatggacatcaagttttaaaaagcaaagaaaacaagagaccaactcaaagcacacaggtgtgcaaatgcagtttaaggaacaattgttttttaatcatatgcagttttcgcataacaaatctatttttgggtattattggtggacaaggtttttaaggtttgattgaatgtattgtaaaagggcatctatttttgggtaagtttagcaccaaataaattcatttctaaatattgacccctctccacagtctggtcacctctaccagggtaccaacagacttcagtgcatggctacttgaacaatatggtacaagacagcacgtgctcgtttggatctaagccttgcccagtgaggagaggcatttggtagcagtaaaaaaatcaagccatatcgcgcaagaaaaaactggctcgcgcaggagagcccatttggctcgcctttgatggcaagctcgtctctcgcacaagttttatgcaaaaccgagtgaaaagctagtgtgcaaagcaaaccaaccaaatagctttccaaggaaaggttcgcttcggtttacctcggcgagctatagcccgaatcagcaaacaaccagacatgccctagcaatcaagacatgactctctcttattgagtcaagaagatcgcttagcaacagggaagcacgagagtgttttcatgctactactagctgttagtgaacaattaacctagcaggttcccaacacgcagcaggcggcaacatgggcggatctaacatgggacatggggattcagatgaacccccaaactttttgggaacaaacaaactgttattagtgtgaaggttaaggcaaatttctagaacagaagctagggttaacgcaaattcgatatatatatatatatataaagagtgcttgggtagagagagatgggaaagaggatgtgctaaccaggaagcggcggaagaagcaggacgaacgacggcgcccctgctcgctcgctcgctcgctcgcgggacggttgggggatcggcgcaggcggcggtggcggaggatgcggcggaagcagcaggacgagcgacggcgccgcctctgcttgctcgcgggacggatggggatcggcgctggccctgggacgacctactgattgccactctgaacccgacctgtgttccaaccggtgaatccgaccggttcaataaaataagtaacgttgagtactagtgtattttattgagaattttgatttaatcaacacataaaaatatatttgtttcgtttctaaaactattgtagcgactagcccaaatagtcaggcgcgcatgcatgtatgcagtaaaggtagtaacgggcccaacttttttgccatgtgctcactttttatatatttctggtatgaaaatatttaagaattaggtagggttttaaaaaatacagaccttgtacatcggggatttaatcaagccagctcatttttactttggttcagtagaaaatcatttggtttaaatgatttttctcaagttaattatattagctcatttttcctttggttctcaagttaattatatcgtcggactagacattggttccgtttttttaaaccccgggttcggttcggttataagatttaacatccgctatattatttcatacttatgtttttctggcttaagtatgtgttattaagcaatctcctactcttggtcacttgtttaaccgaataggtagtgtttggcaaatgggaaaaggaaataatttcccacccatctttaaattctaactattcattctcccccttccatttaatcctaacccttcatttatttcccaatcccaatcccacccccatttcccattatgcaaacacactcgtaggggatgggtgagtacaagtaggtaagaagtacaattcacttcaataatataaataaattcatgttttttaatcagttattctgtctatgggtgtgcttagttatttgggtgtaaaaactttgaagtatactgacacacatttgaagtattaaatatagactaataacaaaacaaatcattagaaaatgtttactgtagcatcacgttgtaatatcatggcgtaattatgcttaaaagattgagataatcccttatatgccactggaaattggtctgatcccttatatgccactgaaaattggctattctcttatatatcattggtccaaatttgtacaccctctcatgccactaccatcaattgaccatgtgttgaccgttaactctcaagtaaaaaagacatatttaccctctctgagttgttaggcatgccctatactcaaaagggtaaatacgtctttttttcttgaaaattaacggccaactgacgggagtagcatgatagggtgtgcaaatttagattaatggcatataagggaagaaccaattttcaatagcatataaggaatcaaatcaatttttagtggcatataagtgattctctctaaaagatttatctcgcaatgtaaactgtgtaattgattttttttttctcacatcttttttgaattgagtttctttttggacggatggagtatgtattttggtgccagtgtttccagaatgcccttgagcattgagcaacgacctgcccaaaagataccgacacggccgtccggcgccagctcgtgcgccgcatacacccgcaggcgtacagcgtacgccaccacgctcatccggttcatcgcgccgaaagaaatcggccaaaagccgctactctactagtactaccccaccccctcccccattcgccgccacgccacgccgctccgcctcgcctcctcctatctctcgccaagctcttcctcttcctcttcctcttcctcctcctcgccgcgtgccgagaagatggggaagcggtggatccctctcgaggccaaccccgacgtcatgaaccaggtgagcgcctctctctcctccgccgccctcgcgtccatcgctagggtttcccgcgcgctcttcttcttcttcttcctcctcctcttccacactcaccgcctcaccggtcgtcgcggggttggcgcctccgctcgtgtcgcgcagttcatgtgggggctgggagtcgccgagggggaggcgcagttctgcgacgtctacggcctcgacgacgagctgctcgccatggtgccccagcccgtgctcgccgtcctcttcctctacccgctcacttccctggtaagttcccaccctcgcgttctgcttccgcttcgaggtttttgtggatttacgtggtgtcgagagggtgatgaatgctgcttcgtggggtgatcaggacgacgacgaggaggaatcaggcgctgctgccacttccacggctggggacaaggtacggctgtacccatctgttttgtttttgccgcatagcgcatccaatgtgctcgatagtcttgcctcggtttgatacattgtggtgtacatgcactgaactacaaattgtgcatcggatttgttacggaattgtcctcggtttgagcaattgagttagactgttttgtggattggatttgttattccagttaaagttactgcacgggatcaggattcagataggtctttcacagtttgattggtgtttggccttcttttttatgcatacattttattactctgtaaaattaatgttgtgtagtgatatattggtttcggtgacctctgtttgtaaagttttaagtagttgttctcttttactgaatgttgtgtatgaatttgtatgcttgtttgatttgtgatatttcactctatccacacaggattgcactattactgtactggaaattttgctagttgaatctactattgtagaatttgctgaactagatgtgttagttctgaggtacccaggacattgaacctcagtattactatatcatgaaatgcaagagtgccttcttctctcagtaccatcaagtgaactccagagatggctgtttttgaatactccctccgtttcacaatgtaagtcattctagcatttcccacattcatattgatgttaatgaatctagacatatatatctatctagattcattaacatcaatatgaatatgggaaatgttagaatgacttacattgtgaaacggaggaagtaccaagatacctcaccttttatcatggttgtgaaatttcttttacattataggttgcatcaatgtgcttttagccttttactaacaatacagaacacctgggtgtgtggctactctctgcagtaaacatggtcctctcctcctttctatttttgtaatggatttgctgtagtattgattctcttgcagtacttatagatacaactactgtgctatgtaaaaaaaatgaggatgcatgcaaatggtcaatggacttaactatcctttgtaacttggaatttgtaaacatgatatgctacactgtatcacttaaatctgtgtgcccaatcaattttagatcaattgcctaatttatgtttctttttgaactataaatcaattgtcaattgacatgctgctatggatgtactgcagttccaattctcatgttatatcttgatgtggaagttcaatcctcatgcaagtgattctacaactactgcatcttaatttgtacagtatgactctacaactactgcagatgacctgatgtagagtcacttcaccatagtcatgagtcaagttagatgttccacaactggttaagatgctgttttatttgcagaaaaagcattttgtcacatatacaagatgtggcagaatttatagtaaaactgtgatgattgtatagattgtctgatggcctgattgttgtgcatgttccttgtcctgaccattatttttcttagggagtgcataaaaaattgcactcactgtgaaactatggttcagctttcattttactaggagacttttatggtatgtactgcattcagtttttggttcattaatattgttccatattcatattctaattgagaaatactagcctgctttcccttttttagggtgttggtttctgtttccttcatctggcatattaaatgggttgagtgttgacgtatatgatatgttggatatctactttcactcaatgcacgatgccaatttgaagtttaccagtttgaaatgtgcacattttaaattatttattacttggaactttatatacccttcattttcttaacccaataccttgatatgcaggatttgagcaagagggtatactttacaaagcagactgttggcaacgcatgcggaacagttggtgttatccatgcaatagggaatgctgcatccaaactcaagctgggtaattactttagctttgtatccacgcttagctagtacctccggttagttaatattgagtcattaactgtcctaaagtgctctctatatagtagtaaataaggaaaaactatcagatagaaataatccaatagatattttaaaaggttgctcaagggattcatattcatccaattatgttagtttgcttgaacagtaaaaagcaagtatccatgcctgttgttctaaaagaaaaggtatccatgtctattctgtcctcacttctcagtctccttcttcagcaaaatatagttgcttgatttgtgatacttcatagtgttccccattttgctttcttactgaaatgtacacatctttgatgcgatgatgtgaaaaaatggtacaaggacattgatattagacaaccagcatgtctaggagaaatttggcatgcttaatcaatttatggttattgggctgccctttaatttgttggcttaaacatggatgtatgacctaatttgtttagtcttattcttactgtttttatttgtaacaagatctgatgtctgctttcttctttgcagttgagggatcctattttgatagattttataaacaaactgttgatatggatccagtccaggtaatgtctgtatgttaaattcattgtgttaatcactaataaacttttttgttatcctaatatgaacagttcttgttgtcttcagcgtgctgcctttcttgaggaggatgatgagatggaggatgctcattccgttgctgcttcggctggcgacactgatgtaaccactcgcatgccccttttctatatgttcacttttgtaatacagttttaaacaacatcatgttgagtagattagataaatttatctcttgccatcataatttcttactgttttaattcgaataactccttgagatggtaaatgctgctggtaggatgccattatactagagtcttcctgccctcggtttacaagctcatattgcagaattgaacttacgagggatgttcttataagttataacaggattgctttaaatcacaattacaatgaataaccaaatatgctaccacagtaccacataagtgcacttgtggaccaacctcctttagccaaaagaaaagggagaagataagaaatgttactaattgcccatatccatgatatagtccttaatgttgctgccatcctaatcatctttcctttgcaggctaatgttgaggtgaacgagcactttgtatgtttctcttgtgttgatggtgggtatccgactgcctttactcaaaaaacaaatcctagtttcaactatcaataatctgttcccaacattttattttttggcatgcaacaggtgaactttatgagcttgatggacgaaaatcgcaaccaatatgtcatggcccttcatcaccagatactttgttacaggtctcaaattttgcatttttcttgtatcttgcttgtttatcacctattgttttgaaatgattcttgtacattctatttctacccttattttagtgcaagcagttttttttgtgaaatgaataatcgtaattatttgtcaaatggaacttatacattatatttgcttaggggggcacaagctaaaatgtatatgcactgaacttaacttttagcatttttacattcggaatgcttatgatccatggatttagggtgtattttctaatttcttcttcttcttcttttgatatttaaccatgagtgaagtttaatttgctttgatttcttctcaggatgctgcaaaagtcatcaaagccagaattgcgtccaaccctgactcaatgaacttcaacgtcatggctctttcgaaagttgtgtaagataaatgagcgttagacctttttcatttccataggcatactaccgaagggggaaaaatgaggaactacagttgaataaaagtagtttgcttgctctttgcaggggttttagatcatagaccaatgtgtttggatgatgtattcacgttttgtcaatcgagaggttatcacagatttaaaatcttcctgttttggttttgaatggagtacttagttactagagcgatttatacatgatttccttgtcgtttttatacatcgatgcaagatgaacggatcacaatgtcaagcttatccaaattataatggcatggtttcaattttccctaaaataaaacccgtatgccccccccccctctccaaaggtcccaagccctatctagtggtcaaaagtaaaaactcagtagggccttgatttttatttagtctttatacattcctacatcctagcagggtttcgtgtatacggagtatatctttggtgtatagtgtatactgtatggtcgtatagataagtaaaatggaaaaaggaaatggagatggccgactcaaacgaatgaactgtgtctatgtgtagctaactactgcacatgggtgccatgccggcacacggcctccagcgcgtgcgcgagcgacgccgagaacacggccatcgactggaacacggcgggcagcttcccctgcacacaggtcaccgccgcggacctcgtcgcgtcgatggccttggcgtgcttccgcatctcgtcctccaccgtcctccggcacgccgctatctcgtccctccgctgcgccacctcgttgctcgcgtcgcgcgcgtgcatgccgtcgtccccccaatgcctcatcccccggtgccacagcgagaggcccatcggcggcacgtacgagtcgtagtagctcttctccacctgccgcagcatccgcgacttgcggtcgagctcgcgggagtactggctgacgcgccgcgctacccgcagctcgtcgctctggagaccgtacagcgaccggacggcgccggcgaagctcttgatcgacttgagcacgtcggcgcagtgcacgcggtcgagcgcctgcccccaccgctcgacgaaggcggcgagctcggcggcgacgggggaggccaccgcctcggcgccgtcgacgacggccggcgcctcctgcagcgtcagcttgagccagccgtgcagcgcgtggacgtagtcgcgctggtgcttggccaggtggcccagggcggcgcaccatgacgacatggcgacctcgagcgcccgcgtggtctcgtagtggatctccgtcgtggggtccatggacgtccggctgctgagcccgcgcagctgctgcgcgatcaggccctgcgcctcgtggtgctgccgcatcgccctccacatgtcgagcgtggcgtggcagagccccagcagctggcgcgccaggtgcgtgtcgcggagctccgcgatggacgcggaggtcgcggccacggcctgcgaggccgtcgtgagctgcgcgcgcgccttctcccacgcggccttgagcttcaggacgtccacgtcgatcttcctgctgtactcctggtcactcagctccgccttcttcttgtcgtgctggacctgcagccgctctctcgcctgcattgcaacgtcaaatcactctactggccatacaagttacaacacgcacggtaatacgtacggtatgacggctagtagttttgattcgaccatgtgttttttggtattttgtcattaccttgacctctcgatacagcttcttctcccaggccagcagctgctgcaagttggagctatgcctctgctcgccattgatgctgtcgacgcggtcgtgcgcaaccgacggcgccgacaggcagcaaagcgcgcccaagatgctgtgcggtccacctgcaacaaaatcaattcatttggtggtgatcagtggcaagaaaactttctgctctgcaactcatgctctctgtcagtgtttacttttaagtgatcaactgatcataatgtcacacctttgtattggccagtgaggcagtggccacatgtacagtaaatgtgaatgtgcgaattaagtagagttgctagtggcttacgcttgaactcgtcgttgctggcctcgaggtggctcgacacggcgtcgccggcgacgctggccttgaggaagtactcctccaaccccgccgcgacctccgcgaggctacggtgcctcaccaccatcctcagctcctcatcaccgccgccttcctctcgcgtgaccgacggcaccccggccccgccgccaacaagatgatcatcaacagcagcgccgacctcctcctccaactcctgcgcgcgccgccgcagctgctgctgctgctcgatggagcggaggagcggcggcggcgtggagggcgcgacgacggggcggtggacgatcacggcgggcggggcgtggtcggacaccgggagcggctcgccgaccgcgaagcgggagagcgcggacgcggcgtgggtgagcgaccggaggtacgcggcgtgcgaggccgcgaggtggcgccgcagccgcaccgcctcccgcatcagccgccgcctctccctgcaccgcttcatgtgctcccgccccgcggccacccgcgcggcgtcctcctgcccgcgcgacgctacggcgcccatatatatatcactgccggtttccttctgttcgtcggccggcgtgggaagcaagcgcgacactcccgatcgatcgagtcttaggtcggatggagtggagttgcgcggtcgatgtgggactaaatatgggaggtgatttgatggagcaagagggaagctaattaagctaagtataggttttaggcgagctaggtgtagtgtagtgtggcgtcaaagatggcacgtacttatcggtatcggcgctctcgtcggaatggccgcgtcgcgttgttgtttatggacacagcacaatggagaacgaacaaaagaaaggcaaaagaagatcgaatgataggaaagggcggtgggaaaaggaggaggaaggagcatgtcgcatattcaggtgcgtagatacgaactagaacgcgacacatgcattttagggattccgttaactcatgcctgcttccatgcggccacgtggctaactcagtttttattccagttataaatcattcgaccataggtaggagtagtaaagagcccgatttccatttgcagtgtacactccatgcagtcactggtcgtcggcctcgctcgccgagtcatcgtctcgtcgacgctgaatcgctgatacctttgcgaactgaatcgtgggctgtcggctcggctcgtcgagaaaaaactggaaaaaggagaggatctcatcaccgatcgaccgactgactcacccgcgcgaaggatctacgtacgtacgtacagaaacacggcgacgcttatccctagctcccgcggacctgcgtacgtgtcccggtgtcaccttccactgttccccttctgtcccccggctttcgcgtctcagtgcgtctgctttgtgaaaaaaaggcttgaattgcgtggcgccgcacctttcacaaaggctggcatttgaatccacacacacacggatgaattatcgcggtaatgctatgtttctaaagcgattttttgcaatcttttgccgctgttttgttctctatcactgcttgctcaattagcttctggaatgcttctggtcggccgggttgacgaatgacgacgagggaagtggaagctagataaggcagctctttcgccaggaggagaaaaggcgaggaccgaggaggagttggtgacttggtgtgggtgcgtggcggttggtgtttactgagacacgaagcaaatccatgcagtggcgaagctagagcaaatgggtggggggtgcctaactttatcaagactataatgtcttttgtgatgttcaagcaaatagtatagctaacacataatttttaacatcaaaattaaactttcagtaatggcaaagtgactttcgtgaaaatattagtaaactagtaggggaatggacaataatactcactattaataaaagaatacaacattgatgactgtggtgcacaaagatgtcccttataacaaaatatgtgatggatcctaaaaaaagagaacaaataggtcaatcatttagcaaaaaaaaatgtacaattatcaatcgaaagtaggtgcattgcatttgtgttacctcttagagatcatatttgcgcccttttccttccatggtcatgaaacgatgaaccacagcctcattgctaacttttttcatttcctctttctctatatagcaaataagtctatgactcaattgttgatcacccatacgattagccaagcttgtttttacaatcttcatgcccgaaaaacatctctcaactgttgctgtagcgacaggcaatactagcacaagcttcaaaagtcgatagaccaatctatacacttgatgttttcctgtctgtaccatcttttgagatagctcagcaatagtgtttatgttggagaattcgttgtcttctctcacatcaccaatgtaaaggcgaaggtcatgtctaaggtccctcagatcatcattgttgaaatcatcaggatatagttttgctaagctcataaaagtctctccatcgaaagcatgaaatgagtctcttgggttgaaagcggctgagcaaacaagcaattgagtggttgtctcactaaaacggctatcaagctcttgaaccaaccaatcaataacatcattaaagcaatccactgcatagtgatgcttgtttgtaattcctgattttttcctaggttgtctgggatcaacatatgtactttccatttccatcatatcaatttcatacaagtcacaaaactgattcacatcatctaataacttttcccaaccatttgttctaagatcatccaaatggagtttagttgatttcagacatccaatggcatttacaatgtcttgatccttgcgttgcaatgcttgcgacaatgtatttgtggcagctaatgtagtcaacatgaggtgcaaataaaatacaaagtcaaaagattggaagtataccaaaagatttgatgcttgatctctatttttccaatctctgtcatccttctcaacaaccttgagcacttgaactattgtagggaacatattaagcaaacttttcagagttttataatgagaactccatctagtatctccaggtctttgaagacattgctcttgatttaaccctgtcccggtctcaagttgcccacaacctaatgcttgctgcacttgttcatgattgatatctctaatcatgtcccttctcttagctgacccacccaccacatttaataagatagaaatcatatttaaaaaattgctaacgcccttatgttttctcacggttgccacaataactaattgaagttgatgagcaaagcaatgcacataataagctgatttgctatctctcatgatcaatgactgcaacccattgaactcacctcgcatgttgctagcaccatcatatccttggcctcgacattgctttaaacttagtttaaactttgcaagaagagaatcaatggctgacttgaggtgggcagaacttgtttcagtcacatggacaaggccaacgaagctctctttcaccatcccaaatttgtcaacatacctcaagaccacagccatttgttctttgcaagaaacatctcttgactcatcaactagcaagcaaaagaaatcatccccaagatcatccaggatagactgtacaatctcatttgcaaaacattcagcaatgtccctctgaatttcaggagcatacaaacaactattctttgcagcatttgtagtcacggctttgtgtaaaattggatcatgttctgctaagcaatcatagaactccttaaaattccctctattgtaggattcttttgactcatcatggccacgaaaaggcaatccttgcttcaacaatactctagctgtatcaatggaaccattcaaccgaataaaataggccttcttagcaacttcacttatctgattataagcaacatctatgtgttgctttctatttctcaaagcatcacatttcttcattgcattatagtgtaaaccaccaacctcaccaacatgtgatcttagcctttctttcctatgatacccattccaaccgttgacaacaaatgcatcatatcctggatctttcttttctctaaacaagaaacaataaaagcaatatgctctatccttttccttactgtattcaagccaagagaactcatcaaaccattctggattaaatcttctaggtttctctttccccccaagttgtgtaataggaaaatcaaatgtgcgaggctgacaaggtccattctccaagtattttcttctcaccttttctctgtggttaggatggtaagcatcaatttctttcctcaatccgggatcatatttaatctcctcatcccaattgatctcttccggacatgaagttccgttaccatcgatcatatcttgagctttccgtttaggtttataaaacctctccatggctacctataattcattattttgtataaataaattgcagttcacaaaagagaaaaaattaattgaggacgagatcggcgagatgatccttgaggacagaggacgaacactcactctagttagtcgagcagcaggcagcggctctttgagtctttgacgctgacgaggacgagatcggcgagatgatcagatgaacgtcgatcgtcgaagtcgaacgccggcgaggcaggcaggcaggcaggcagccacgatcgtcgcacgcgcagctgatgcgtcttcgtgggcagcggcttcgtcttcgtgcagtcctgtcttcgtgggcagcggctcgctccgggcgtcggcgtcgcgactcgggagtcgggaggaagggcaggcagtcgatgcgtcgctgcgtcggcgtatacggcgcgtctcgcgaagtcgtcgtgaggagaaaaagagttgggcagctgatgcgtcgtgggctgaataagtggcatcgtgggattcaaggtctggtgggggtgcctcctattgggctgtaggggtgcctaaagggccaaaatttgttcatctctaagaaattttaggaatctggggggtgcctgggcacccaggccgcccaaagtggcttcgcccctgaatccatggtaggtgattaatgtggttcggagcgcagaggataatgccgtgccgagttggtccgaggaaatggatgagcgaggaagaagatgggttagtgggttgtgcgtacgtgagcacgaccgacgcttgtctttagtagagtttgattgttgctgaattgagcgacatttttgcatcttggtcctttgcaaaaagtaattctacaaaatatattccaagtttggacctcacattgacatcaaaaccagagagtctacctataaatcgttagtgtcaaccttcttggtagtgtagctattatggtgattggcctgcatatagggaagaggtcgacaacagaacacagcagcataaatctacatatttagttttcataaacctaaaggtggcatcaacgtacaagaagttaacaccaatagctctagcatcaacctctatagagttatacattagcaacgcagatggctaaagttatcatatgtgcgttacaggtccatacaagtctccttatttccaacacattatatgtcgatgttggtgcgcaccaacctgaggtccatttgtgaaataatagcatgttctaacttgacgattgggggggggatgtaaagtcaattggacaaagacgggcctgccgatcagccggggggggggggcttgggagtcctaaacttggacaagttcacaagggccttgagattgcgattgttatgatattaatggaaggacccaaccaaaccgtgggtgggactggagatgccttgtgatggattagacaaggacttttttgctgcttcgacaaagataaccgtcggagataggaatacggcacgcttctaggactctgcatggattgatgggcaaagaccaaaagatctcatgccacttgtctatgggatctccaaaaatagaagaaaatccctgcgccaagggaaagagggtgacgcctaggtgaatgacctgaccctcgatgcggcctcgcctatcacaatcaacctcgtcgagcaactggtccgtttgtgggaagcggttcggaatgtgcaactagacagtgaagaaccggaccagattgcctggagattcacaagtaatgggcactacacagcttcctcggcctatcatgcacagtgtttaggggtgccaaactcaagtctaaactccctgatctggaaagtctgggcgccggggaaatataaatttcatgcatggcttattatccaaaatagagtctagacatctgaccggcttgcaacaagaggctggcaaaaaaatggacattgccctctctgccgttctgaagctgagacgggactgcacctcgtcttcaagtgcagatacagaaagagaatttggcacctagttgctacttggatgggctatcaacaattggagccgactgagtgggaggaaccccggtcagtccaccaatggtgggagagcttggcaaatacacccgacgtccaaaaaagggcctccgatttctcatcctgctagtcgtctgagaaatctggaaggagaggaactggcagatcttcgaccacaaagaggcggcaataggctttcttctaacacgaatcaaggaggaggctagtctatgggctctagcgggggctaaaagattgcgtgaactcgtcccgcacattgtatagtgtgtagctcaaagtttcttttctttacccttaggggttgtattttcttctgctctattcaatgaaaaggcactactgtgatgttttccattaaaaaaaagaatatagacaaaataaagtagctcatatggattaatagaaagcgagcaaataacttataaaaagttctctaaatgaagatggttctaaatcgtgctagcctgctaggtgatggtcgcgtactcagttctatttggggagatggtgaagatgttttttcatattcttctcaagaatcgtgaaatactctctggtcctaaacatatctctcccatccaacgctgtgtgatgtgttgtctaaaattctaaactacaccagtcgcttcgcgattctgaatcaaaagcccatcagcccatataggtttgttttggtttgaagtcctgttaaaattttgtagtgtttgaaacttagacaaaatttggtactaccaaaattttcaactttactgaattagcaagatttggtctcaatccaaatagctagcaagtacaattcaaaacaaacaaataaattggtaggtcaattgacctcaattcaaacatgcccatatatacctttcaccttgaaaggagctaactctgacaactagggcttgtccactaaatctgtcattattgatgaatgtttatgtttcaaaaagaaagtaaaatcacttccaattagcaaactttttttttacatatatataagttttgacaccatccaactggttagagcctatgagccctttcacaaatcaccttagctctcaaatatttttagctcaaaaacctattccctccgtccaaaaatataagtatttttataccctgacacggtctacgagatgctactttgaccaacaatatctataaaaataatatgttttaaataaaaagagttacatattatgatagtttgtttaatgataaatctagtaacatcaatgtaaatcaattttacatgtttgatattttttatttttttctattaatgattaaagttataaatgtttaaattgtaactatgctaataatatttatattttgggatggagggagtattaaatttcatctcaacctttttagatccagtttatacccagtcactctggtgcttcttgacttgtcctttttcgaccctcgtcgatctgcctgctgtgcgtgtcctgcgccctgccacgcactcattacgcgcggctgactcggatattgctggccacggattacgcctactcacttctacagttctactccgtatttgcggtttgctgccctggaaagctagctagccatgccaccgctgaaactgaaatggacctggaaaagcttctttttccagaagcattaagccgcaaaatcatcacaattcacaaaccaacccaagcgcggcaaacaagccaacacctcgtgcagcgcagcaacaagcccacaagggtttgggcgtttggtgatcgatttgggtttggaacgtttggtgaaattgctgcctgcttctttgccccggttggttctctctagttgggaacaagacgggagtgtagggtatccacgtgtctggatcctactggctggcctcatgacaaagagcacccgtcaatggtcgtgatcatcagtactccctccgtcaaaaaaaaaagaaaaagacaaaccctgattttcgtgtctaacgtttgaccgtccgtcttatttgaaaaaattataaaaaaattaaaaagacaagtcacgcataaaatattaattatggtttatcatctaacaacaataaaaatactaattataaaaaaattttatataaaacggacagtcaaagttggacacagaaatccagagtttgcttttttttttttaagacggagggagtatatacaatcaactgctcctcggcctcggctccccgcacgtgcgcaccaccatggactggtcatcacttgtcgccatcactttgatgcgtcaccaactagctaagaccggctagctaggttgatggcgagagtaatctctgttgtgaacttggaaatttggaagagatccaaatccaatgtgcaactgcaccctcttgcttaagagaaggggcaaagtatccaaagcattttccctgtttatccgagtataattttttttagataaaggattatcaaacccggcctctacacgtttgtggggcaaagtatccaaacccggcctctaaatgtttatccgagtataaatatacattgtttttcggcaatttttcatcaccaggttagtgcatgattttaggtgagagtcatattgcactagcactatgaaactcataagtagccggtgaaagaaaaagaaaaaaaatccaaaaaataacattaacaaacgtttaatttaaaaaaaatgctattaataagtacgagtttcatgaaatatcaaaatacaagtaactttgtcccagaaatgcaatcgtcgttagagctcctttagcagacattcattaagtactataggatgaacaatacattgaacggcgtgtgatgaatgaaaccctaacatcgatggtatttatgagagaatcgttcttgcgatgacattttatgaaactcgcattcatcgatagcattttttggatttgagtattagttaatggtattttttaaaattttctcaaagaaaaatgtcttactacaatactactcgacaccaagggagatcctactcaactgcaactgacatacagttaagccagagaattaatccgttcctactcgacaccttgaacttgttatgggcagtgggcatattgcccgacacctgattacgactgggatcaaatccacgcaatcctattacatcaaactgttaatgacactccattatcatggataagcacaagggctagttctttaaacaccttgcatttggccgctttcttgtcaatcatattttatacggcgtaattacaaagaatatcttcagtcctttgtgctcatcaacttgccctcttgctccaccaaccatccagatcgcaccgaacgacggcttttagtcagcaactgggtgattagttaattcgctgcgttcaaaaaaaatggttaatccgctagtgcgtgccagtattgcacgtgccgaccgttttgcaattaacttaattaagggctatgacatgtaggattagctaattcgatttgattttgttgttcaggttcaggtctccatctgttgaccccaacaaaatcttcagtttcaatgggtacctcctctcctctctcatcccatggtttatcagtcaaacaagctatcttccatttcggtcaaacatggtttcataaatttaatttttgcatcaatgcaccagtgagatgaacgctctgaacttctagcacctacttccccagtaagcctggactgaatctcacttggtagtaattaattattgcaactgacaattcatttgcaacctttgatatatgtaatgtttgttacatcatgatggagattcgcaattgtctcatttagaatttgttgcgccttctctttgcaattaagagtaaactttactttgatcactttttattattgatgtttcgctttctatcaccctttaataaatgttttcactttaaatcagttattttttatctatacgatattttagaccacctttaattcttttatttatttcattcaatttgtcatatgctaaataaatgattttacatatagttgtaaaagttcattgacgagtaagaattgacgagatcgttcacatgcttaaaagagaattggatagtccaaagtgaaaaaggacaaatttatctagtctttggtgaaaacattggttaaaaaataacagaaggtgaaatataataaatggtgattcaaaataaaatttgcatagtatggttgaaattagggtgtgtttgaatggaagtgaaaagagaagaagatccacaaaacgaaaaaagaatgaaaattttctccgtttcaccctcgctcactctaacgcagcctaatgagatctgacgttcgctaaacgataaaacagcaacctgctatagtttgaaaggaatgtccgattgtgcgactgttataccaaagaccaaagagtattctcccttctagaaacggtttgagaaagtcttttttctagtaagattttatatgtattgatctttttctttttctcaaattttgtgcaagtcttacaaaacctcaccacatttcacaaacaatcttttttttcccttttttctggtgctgcgcaatcatccaagaacaatggcgtgattgcctggaactcgtcacatttcttggagcagtgcattgctctgttcatgaacttcttctattctgcagagagtgatgctctgttctgaacttgctcgacccatcaagcagcaatcgatcacgcacagtcgcacaagatggctaaatcaccactaccactaccacatcgccacttagctcaccagctgctggatcggaccggcggcgaaccatggctgggccgggagggcgagctgcaccggtgcctgcgccggtggtggcggtggtggaaccagtgccatggccatggacgcggccgcggcctcgcctctcttcctccgcttcggtgacccggaggaggaagacgacgacgaggaggaagaggatgaaggggaagaagagccggagctcgccgggtcgggatatggccgcttgttgcccgcggcggcggcggcggccgcggcggcgatctcggagccgatgcggagcgggaagttgaggagcgcgcgggagccgcgcatgcggtaggcggcgcggtcgtacgccacggcggcctcctcggcggagtcgaacgtgccgagccacacgcgcgcgccgttcttggccgggtccctgatctccgccgcgaacttgccccacggccgctgcctcaccccgcggtagtgcttccccctcgacgccaccgccacggcctcgccctcgccctccctgatccccggcgtcaccgtcgcctccgtcgacgtcacctccccgggcgtccccgcctcggacgacgacgacgcgaggaagctgccgatggaggacccgtcgtaggagtcctgcgactccggcttgacggcggcgaatgagccgtcggggagccagccggaggagaaggcgtcgcggagggcgccgtacacgaccatgtcctcggcgtcgttgggccggaacggcagcgactcgctccactggtcggccacgaggctgccgaagcttgagctccggcagtacaccggccgccgcgtcggcgccggcgccgtcgccggcgtctcctcctcctcctccaggaggtggtgccggatgctgtccagcgcggccacctctctcgacgccggattaagcagcatctttgaattatcccgtgaatttgaatttgattttgttttgactcggactagcggaattgtggagggagtcgggttcgcgccagaatatatagtagagtgggagtgcgtcgtcttttgtcgtctcgcttctggtttcgttgaactttcctgcgttattatcccccacgtgatttaattaatggtttctaaattgttttgcgattggattgggtgcaacactgtagcctaaacgtcagcatctaactacatgacaaatgattttatagcttttgagttaagtgttaattagttttagattttctcgtacggggcacctctttagtagcttataccctgtctaatgtatatactacagtcaacaatactcatgaaattattcactgatgaagtatgagataatacgggacaattgtgacgcaggagaaaacaagacggacgaaactattctcacagaacatatacgaacgcgattaaaatgtgtgcacgcacgaaattctttccactggactttccaggtttgacacaccgccacgcgagagagggcaagaaagcgaatttgtttcactttagattaccgaatctaaagtgattcaattcttcgtctatgactcgccggactccacccgtcaatgctccacggttgaagaaaaaccagcggcaatctagtcgcaatcgagagggaggggcgacaggtgaaacttcagggtgatttcctaatttgatttgagctcgtacgcttccccacatgctcaaactaccatttcatggaaaattaccatgccacgtggatttacacgcgacagcatcgttgtcattgaatagtactactacctgcttgccagttgccagttaataccaccagtaaaacttgaggtgtggactcttctagagagagatcgtcatcgctgctcttctccattaaagtttagaagtttacaacgtcgtacgttcagaggggttgacattgcatctcagcacctactagtaattcaaattgcacctttttttttttgagaacttcgaattgcacctcaatatcgattgattgcactacgctaatagtatctgaatggatgaattgcgaagaagaactttgtcagtttatgaagagttcagatgttcctttcttaaaaaaaaaaaaaaggaaaggagaaagaaagacagaagaagatgtttgcctttgcgttgccccgtctggacaccgaaacggattcccagctgcgcctgggcccaaccattctctgggtgcactgaacctgccccctggatccaacgaatgatcaaaccaaaacctatatagagagattaatgagttatgaccagaggaggaagaacaaactgctgtcgctatccatccgatcaataaacgaaggaaaatgaaaaaaaaagggttctggatagacttttcgacaaatcctcacgtgttgtgctgaccattcgtggaggaaaaattgagcgtgaggtcgcgggcatgggggccggacgacctcgtgcggacgcatgccgatggatgatcgatgcctatctccctctttcttggatgcttcgtcgcgacagaaaccacaatggacaaccggtctctctcctcctctcgcccgatcgatcgaccgatcgccgatcagtcgccttcggggttactctcgtttccacgcttattccataatccatatttcctgcctgcctcttgggtggctgatacagcttacggcgccagccacgggcggatagcgacggcaggactaaggtggtggtgctggtgcccgttgataagctagctgcattttctaatagctgctccagtgagtctacaatcgattctatgaaaaatgagaacggaatatactgccttgccttgtcgcttatccttatacttatcaaccaaaatttaaatttttaattttaaatttaaaactgattttaggtttttttatcaaagtttatttttcagtttttacttttacatcaataagaacacgtatataaaagttttattcacaaattattttccgtttgtgacagccaaacgatgagattgatatactttactgtggcacatgtcagaggaaaaatcgaagtctaaactgtagttgaactcaactgagaaaagaattatttgttgccggtagcagttggcacatgcagtcagcgtagaacgtggtaattgtgggaatttttaacatggatcctgtagcgcccgttccgtcgtggcgcctagcgggaaaattatctccgaaaaaccctaattgcgaaatttgtttctttgattgttgtctagtgtccgtgccatctcaagatctcaattcccgatctatcgtcgagttcaattccgaatccaattccttccaaatcgaatccctccgcaaaagtctagtttgcctcccccgggttcgatgggccgaattccgctcggcccatctcttccccggccctctctctcccgggcgctctctctctctctctctctctctctctctctctctctctctctctccccctctcccccggccctctctcctccccggcgcgctccgctctccctccccccccgctcagctccgctccgcctcgcccgcgcgccgcgcgcgcgtgcgcgaagagccgcgccgagtgctcctcctcctccgctccgcccacgcgcgtacgcgtgagccgccgcgccgagcgcccccttcccctctcctcgctctgtcgcgcctgcgtaagccgcccgcgcggacgccgcccgttgcaagccgcgcgcgcgtgccgagtggccgaccgcccggtcgtcgccgccgtcagcctttgcacgcgtctgtcacccgtgtcgtcgcgccgctccaaaccgccccgccgtcatcgccgtcgtcatcgcccggcccccgccactccgcgcgctagcctccaaggggcggaggcagagagcccctctccctctgccgagtcgccccgctccctcccccttttcccgaatcggcaaaagagcaagccccttttctctccctcctttttccccttttcctcccgccggcgtcatcctccctccctcctgtcgccgttttggccgctagccggagcgccagctcgcgccttgaccgccaaagtcggtttccaaaccgacattgccgccccctataaacccaggcgccctcccttcccttttctcccattcttccctgtttctcgcccgcgccattgccgtccctctcgccgaccgcagccgtcgcgtgtgtgccggaggagccggtgcgcactaggacgcggaaggggactccgggcgctcgtcttcctcctcttccccggcccgaggccggagagatcactcccgcgccgtcggcctctcgtcactgcgccccgtcccgcacggtagtgtctctctccgttcttcctcctcgctccatctcctccccctagctttcggtagtagcttaagtagactccccgtagttagccggcgccgccccgaccgttgccgtcgctcgccgtgtgctcgccgccgtcgccgcccgagctccgtagcacccgctcgtcgccggcctcgctcggcgtagttccgcccaatccgacgctagcgtcgagttcccgaagccgcgtagatgctctcaccgccgggaatcgacctctcgtgacctcgtcgccgtttccctcttctcccgccgccggttgtcgctaccgcaatccgccaccgtcgagcatcctccggcgaatccgagccgttggctcgcctccccttgtcacgtgcaaccgcccggtgtgctcgctgttgcccgtatcgccgtggttcgctccgccgctcgtcgccgccgcccgccgtccattcgcggccgggtcgtcgtctacctcccgccggcccgcgtggcatccacgtaggcgccacgtcggcgccagcatagccagaccgggtcgggccgaccccggtcggtccctccgcgtgcgcgcgatccaccgcgagccgtgaggctacgcgtgggcccgccgcacctgcgtccaccgcggaccgcgcgcatgcactgcgtcccttccccgcccgcgcgcgtgcgtcgcgtgctccctccgcacggtgagccgagccgctgacaagcgggtcccacccgggaccgcgcgtggtgagcccggtccaccggctctctctctcctccctcccgcgcgcgcgcgagtttgggccgccttgggccggccggcccatttagctcggccggaccgctccatttctcttgggccgcgccctagccgtccgagaaaagtctatattccctccctcccttcttttctttttcttttccaaaaaggatttaattaaatccttttcctttagatcaaaaattcaataatcttagaaattcaatatcttcccaaccgtaaatccgtttgactccgttcaacttccaaaattccccaaatctcgagatctatctaatggcacgcttataggtttttaatagggctttattttcgccgtttgttgagttgttccgtttcgcgtatagtttcagagcccgaagacccgcagtgcgaggatttcgaggatcaagctccagatctcgagcaaggcaagccacctttgaacatcttgagcctatatttgaaatttaattatgttgcttgcaaaatattatgcattgatagatcgcacttaatctgtttgtcccgtctgcaaggcagattggcggacctacctaatttgtcgcatttgatccttcctttgttaattgctataccatgtccccttgtaaccacccagttgcgcctcgatactcgtgcactctgtgcaagtatcgacggtcgccttcaaacttaaaatctgagtaacaacttgggtaaaactggagttttacaaaagacttggaaaacccgacacctgggtcggtgcttgcgaactaaatggattttccaaagccgcggaccggggaacgtaccgggtgtacggtttcccactcttgcacctaaggaccgtttccttggaatttcatccgaacataagacaagtacgaccacatgggtggaatgggacacccctggctgagtaactagcttatcaggggagccttgatgccgagagacatgtggattcgccggggtggtgtcggggaggacccctgggcttcctggcacagtatggtctgggacctaacctgttgttggtctgggacccctctcgtcggcatatggtaaacctgtgtcggctttcgaaatgccttgtcatgaaagcttggaggtcccccggcgtggctgatccccacgggctgggtgacccgggttagtaatgtcgtgtgggtaaagtgtaccccctctgcagaggttaacaaactgttcgaacagccgtgcccacggacatgggcggatgtgaggtgattcctagcgtagttttgtttgtctactgcttgtgaaattgctgttgtgaaaaggggttcgatgtttgaaaaatctgcagctgatgggatcagctaggcccgggtggccgtttggaaagttgttggcccgggtggccgtttaaaaagctattggccgggtgccaaccttgttgcaatcctaaagattgacacattgcacatactccgaccggacgagacgcactgtctcatccgtgtcgtttgagaagcactcacttagttattttcagaaaagagttcaaataaaatcaattgcaaaaacaacagccttcccttgaagcctgcattaaacacttatttcccctggcttgctgagtacccccgtactcacccttgctctatataaatatccccccccagttgctgaagaagatgaagcggatcctgctgatgaggagttcttccaggagcaagccagctacgatgagttttagggtttcggcctagttcccaagtcgcgcctgtgatgtttggcccaagtcctggcttccgtttcccttttgtaatgcagttgtgagctcgggatctgtccgcagcccaacatgactgtacctctactctataataaagagacctctgttgctgtggtattctgtctccctgtgataccagcactgtttcctgggactggtatcgattaacaggctaaattggagcgtcacgggctagttccggtcgggactagttcggggcgtgacaagagatggtatcagaggacaggcttggccctagggcgaaacccgacgcttaggacgaccctaaggatactaagttcaaaactacttgcgaaaagctaaggtttcttttgctttctttattttcaatagtttgtttctaaaacggttactgatctttctccctctttcaaaattgtagatggcagtgaacgccagcttcagttcccacggttttggtgagggtcaccacgtcgcttagcttcgtgacctctcccgtttccttggcttctcgtgtcccgagtacacggggtactccgtggaccgtgttccccctcactgtgagctctctgtgtacctttacccccgtggaggtatacacggagctggccttcgcccacaccacttcaccgtggccaggcccactctccagatcgcgtaccaggacctctcctggactgcgcttcgtcacctggcccacgactacagccaccgtctcggaggctccgccttccggcagcttccacgccttccctctggccactcagacgccaggtacccttgtccgtacagcgagtctcagccagtgctgactcgcatggttgagctttcggaggctcaggccactcagcacgacctactccttgaggcttaccgctcccttgcccgccgctacgccgccttggaggcccgtctggccgaggagggtgtcacctcagttgacactatctcttgggactcaggacgcctctgccacgccagccacctgtcctcccacagctcccgcggctctgcctgcactcccagtggcccgcgctcccccagctcgcgtgcgccgtactcaccagtgtactccccctacccacacccagttagcccttcctacaccccggacacaccccagttgcttcctcccgccgtggcccacgctttatccgcaccgcgcggaagcgtgttgttggttcttccaccgtgttccgtttccgccacccagctcccccaccgccagcggcccgtgctgctgccggccctcgacaggttccgccggtcccttcgcgccagccgatcgacgtttcttcgactgaggagccgactacaggaggcagccaggccgacgaggagtagaggaggcagtcttcagcagccgtccgtgtgataggcccttttgttccgccgccaactcttttggagtcgtggcgaggtagtgcgtgcgtgtgtttgtggtgggtgttgtttggtagtctggttctcctaggtggtgtgcgcacagtcaagctcggcgtagctctgtgacttgtccacacccgttatatcaggtgtttttatgatttgaaaaatccagtttatgcctagtgtgtgctatctgagttgctatttgctttgctccttgccctcctaagtgcttatctgactcttaccccgcccttttctgggagtttagatggctagccgcccccgccgtgcagctcgtgcaccagcccgctttggttttgaagatggtagagttgaagcagaagcaaatcatgaatcagctaatgagcagtctcaccacagcaaccgttcgcaccgtactgtttcccgcaacgcagaggttgagcaaccccgccgcagcaaccgctcgcatcgcacagttttccgtaatgcagagatggaacaatctcaccgctctcaccgcactgccagtcacaattctggagaagaacacctccctcccccacctcatgtggaaaacaacatgcaacacataatggcagttcagacacaaatcttgcaaggactaaccacagccatagccagttttcagcataatgcgcatggaaatggccaccctcacgtgagcagcaatagatccaagctgacagattttctgaggtcacatccgccagagttctctcagaccgtcgagcccgtcgaggctgacgattggctgaaagatgttgataggaaactcaacttagtgcagtgtactccggttgagaagacgctctacgcctctcaccagctaagaggacacgctgcagattggtgggagaattactgcaatgcacaccctgaacccactaacattgcttgggatgagttcgctacggctttccgtgcagctcatgtgcctgaaagcactattgacatgaagaaagaagaattcaacagacttaagcaaggcaacatcagtgtcaatgagtacctaagtatgttcaacaagttggctcggtacgcccctgaggaagtggacacagacaagaagaagatcaggaaattcttgaaagggatcgcagttggaatgagactccagttgcttgctcatgacttccccacctttcaacatatgatcaacaaggcacttctacttgaggatgccagaaaagaggctaccgaagaatacaagaaacgcaagtctaaccatcagggaaattcttcccgaggcgcacctcgccctcgctacggtcaacccatgcaataccaccagtcggtcactcaggctaaccgccagccaggctacgcccctcgtcctcagatgaaccgtccggcacctcagccacagcagcgtgcccctagtagcaataccgcgccaaacagtgttacctccttcaagtcaccacagggaccgtcagcagttcagtgtttccggtgcaaccagatgggtcactatgctagacagtgccctcagaatcctaccaacaccaactcagggcatgctaatggcagcaccgccagaactcctactccagcggcagctcagtctcgtcctagctctcaggcaagtggacaaggttctcgtgcttccaaccactttggtcgaggaagtgtgaatcacattcaagctgaaaccgctcaggatgctccagacgttgtgatgggtatgttctctgtcaactccgtacccgcaatagttctatttgattcaggagcttcccattctttcatatcacaagcttttgtgaaaagaaatggttggaaaacccaaaatttgcgtgtaccaatgatagtacattcccctggaaggaatataagggcaactcaaatatgcccggaagttaaccttagaattgaggaagttgacttcctagccaaaccgatagtcctagactcgcaaagcttggatatcatcctagggatggattggttggctaagcacaaaggacagatagattgtgccgaaaagtccatcaccttgcaaggacctggaggaaagcaagtccgctttacccctaacacccctaccgcaagtcggtctatcctaacctgtttacaagtcacctccctggagtcggtacccatagtctgtgaatatcccgacgtatttccagaagaattaacgagtatgccaccagaccgagagattgagttcgccatagaactggcaccaggcactgcaccaattgcaaaaagaccataccgaatggcagctaatgaattagcagaagttaaaagacaaatcaaagaactggaaagtaaaggttatgtgcgacctagctcatccccttggggagccccagtgcttctggttaagaaaaaggatggctctgagagaatggtaatcgactatagagccctgaatgaagtaactataaagaacaagtacccgttgccacggattgacgatttattcgatcaacttaaaggagcaagagttttctcaaaaattgacttgaggtcaggttaccaccaactgaaaatcagatctgaagatatcccgaagaccgctttctcaacgcgttatggtctatatgagttcacagttatgtccttcggactcactaatgctccagcattcttcatgaacttaatgaacaaaatcttcatggaatacctggaccagtttgtcgtggtgttcatcgatgacatcctgatatactccaagaacgaggaagaacatgttgaacacctgaggctgataatggaaaagctcagagatcatcaactattcgctaaattctcgaaatgcgaattctggttggaccgagtagcatttcttggacacgtgatttcctccaacggtgtcgaagtagatcccagcaaggttgaagctgtacttgcttggaacccgcccaagaacgtgtcagagatccgcagcttccttggcttagcgggatattatcgaagattcattgaaggattctctaagctagccagacctatgaccgagctgttaaagaaggaaaagaaatttcaatggtctgcagcctgtgaagacagctttcaagaaatgaagaaaaggttgaccactgcaccagttctcaccttgccagatatccgaaaagatttcgagatcttctgtgacgcatcaagacaaggcttaggatgtgtcctaatgcaagaacgaaaggttgtggcctatgcatccaggcagctcaggcctcatgaagtcaattatcccacccatgatctcgagttggcagccgtggttcatgctcttaagatctggaggcattatttaatcgggaacagatgtgaagtgtacaccgatcacaaaagtcttaaatatatcttcacacagaccgagttaaatatgaggcagagaagatggttggaactaatcaaggattacgatcttggaatccactatcatcctggtaaagccaacgtggtcgctgatgcgctaagtcgcaaggcctattgcaatgtagctcaaatacggcctgaccaagatcatctgtgcagagaattggagaagttaaggctgaccgtggtacagtcaggagtccctgccagcttgacagtacagcctaccctagaatcgcaaatccgggaggctcagaaagatgacgaagggataaaagagttaataaaaagaatacaggagaagaaggacaccaatttctccatagacaatcaaggcacagtttggtgcggtccacgcatctgtgtaccggccaagaaggagttaagagatctcatcctaaaggaagctcatgagtccgcttactccattcatccaggaagtacgaagatgtaccaagatatcaaggcatacttttggtgggctggaatgaagcgagatgtcgcagaatacgtagccttgtgtgacatttgccaaagagtcaaggcagagcatcagaggccagcaggtctgctgcaacccctaccgattcccgggtggaaatgggaagagatcggaatggatttcatcaccggtttgccaagaacccccagcgggtacgactccatttgggtaatcgtggaccgactcacgaaatcagctcatttcgtgccagtgaaaaccacctatgatggaaagaaactagcagaactctacatgacccatgtcgtatgtagatttggctgtcccaagaaaattgtgtcagaccgaggcactcagttcacctcaaggttctggaagcagttgcatgaagccctcggaactgatctgaattttagtacagcctaccatccgcagaccgatggtcagaccgaaagggtaaaccaaatcctagaagacatgctacgtgcgtgtgccttggatttcgaaggcacttgggatcgttgtttgccgtatgccgagttctcatacaacaacagttatcaggccagcattcagatgtcgccgaatgaggcaatgtacggaagaaagtgccgcacccccttgtgctggaatgaggtgggcgaagcactggtattcggtcctcacatactcaagtcagcagaagaacaagttaagctgatacgagaacgtttgaagacagcacagaaccgtcagaagaattacgctgacaatcggaggcgtgaccttgagttcgaaaaaggagatcatgtgtacctgcgggtatcacccctccgtggtatgagaaggtttgggatgtccggcaagttagcaccccgctacatcggcccctacctcataaccgccagacgtggcgaagtggcttatcagcttgagctacctgaaggtctcgcagatgtgcacaacgtgttccacgtatcccagttaaagaaatgtattcgagttccagaagagcaagttcccctgggtaatatcgagctggaaaagaatctgacctacaaggaaagaccgatcaaggttcttgaagaggcagaacgtcagactcgaaggaagaccatcaagttctacaaagtccaatggagcaatcattctgaagatgaggcaacctgggaacgagaagatcttctccgcgccgagtttccggagctgctcccttaggtgctgaatctcggggtcgagattcttgttaggggggttggtctgtagcgcccgttccgtcgtggcgcctagcgggaaaattatctccgaaaaaccctaattgcgaaatttgtttctttgattgttgtctagtgtccgtgccatctcaagatctcaattcccgatctatcgtcgagttcaattccgaatccaattccttccaaatcgaatccctccgcaaaagtctagtttgcctcccccgggttcgatgggccgaattccgctcggcccatctcttccccggccctctctctcccgggcgctctctctctctctctctccccctctcccccggccctctcccctccccggcgcgctccgctctccctccctccccccgctcagctccgctccgcatcgcccgcgcgccgcgcgcgcgtgcgcgaagagccgcgccgagtgctcctcctcctccgctccgcccacgcgcgtgcgcatgagccgccgcgccgagcgcccccttcccctctcctcgctctgtcgcgcctgcgtaagccgcccgcgcagacgacgcccgttgcaagccgcgcgcgcgtgccgagtggccgaccgcccggtcgccgccgccgtcagcctctgcacgcgtctgtcgcccgtgtcgtcgcgccgctccaaaccgccccgccgtcatcgccgtcgtcatcgcccgtgtgctcgctgttgcccgtatcgccgtggttcgctccgccgctcgtcgccgccgcccgccgtccattcgcggccgggtcgtcgtctacctcccgccggcccgcgtggcatccacgtaggcgccacgtcggcgccagcttagccagaccgggtcgggccgaccccggttggtccctccgcgtgcgcgcgatccaccgcgagccgtgaggctgcgcgtgggcccgccgcacgtgcgtccaccgcggaccgcgcgcatgcactgcgtcccttccccgcccgcgcgcgtgcgtcgcgtgctccctccgcacggtgagccgagccgctgacaagcgggtcccacccgggaccgcgcgtggtgagcccggtccaccggctctctctctcctccctcccgcgcgcgcgcgagtttgggccgccttgggccggccggcccatttagctcggccggaccgctccatttctcttgggccgcgccctagccgtccgagaaaagtctatattccctccctcccttcttttctttttcttttccaaaaaggatttaattaaatccttttcctttagatcaaaaattcaataatcttagaaattcaatatcttcccaaccgtaaatccgtttgactccgttcaacttccaaaattccccaaatctcgagatctatctaatggcacgcttagaggtctttaatagggctttattttcgccgtttgttgagttgttccgtttcgcgtatagtttcagagcccgaagacccgcagtgcgaggatttcgaggatcaagctccagatctcgagcaaggcaagccacctttgaacatcttgagcctatatttgaaatttaattatgttgcttgcaaaatattatgcattgatagatcgcacttaatctgtttgtcccgtctgcaaggcagattggcagacctacctaatttgtcgcatttgatccttcctttgttaattgctataccatgtccccttgtaaccacccagttgcgcctcgatactcgtgcactctgtgcaagtatcgacggtcgccttcaaacttaaaatctgagtaacaacttgggtaaaactggagttttacaaaagacttggaaaacccgacacctgggtcggtgcttgcgaactaaatggattttccaaaaccgcggaccggggaacgtaccgggtgtacggtttcccgctcttgcacctaaggaccgtttccttggaatttcatccgaacataagacaagtacgaccacatgggtggaatgggacacccctggctgagtaactagcttatcaggggagccttgatgccgagagacatgtggattcgccggggtggtgtcggggaggacccctgggcttcctggcacagtatggtctgggacctaacctgttgttggtctgggacccctctcgtcggcatatggtaaacctgtgtcggctttcgaaatgccttgtcatgaaagcttggaggtcccccggcgtggctgatccccacgggctgggtgacccgggttagtaatgtcatgtgggtaaagtgtaccccctctgcagaggttaacaaactgttcgaacagccgtgcccacggacatgggcggatgtgaggtgattcctagcgtagttttgtttgtctactgcttgtgaaattgctgttgtgaaaaggggttcgatgtttgaaaaatctgcagctgatgggatcagctaggcccgggtggccgtttggaaagttgttggcccgggtggccgtttaaaaagctgttggccgggtgccaaccttgttgcaatcctaaagattgacacattgcacatactccgaccggacgagacacactgtctcatccgtgtcgtttgagaagcactcacttagttattttcagaaaagaattcaaataaaatcaattgcaaaaacaacagccttcccttgaagcctgcattaaacacttatttcccctggcttgctgagtacccccgtactcacccttgctctatataaatatcccccccagttgctgaagaagatgaagcggatcctgctgatgaggagttcttctaggagcaagccggctacgatgagttttagggtttcggcctagttcccaagtcgcgcctgtgatgtttggcccaagtcctggcttccgtttcccttttgtaatgcagttgtgagcttgggatctgtccgcagcccaacatgactgtacctctactctataataaagagacctctgttgctgtggtattctgtctccctgtgataccagcactgtttcctgggactggtatcgattaacaggctaaattggagcatcacgggctagttccggtcgggactagttcggggcgtgacagatcccatattcgacttcaaatgctacagctatccaactaaacacattcgttttcggtggactatacaagtcgaaccggcactagagatgatctaacgaggataagacaggacaccctctattcaacctcgtaccagattggataataacctgatacaaatcaagatagatgtttatatatttatagtactaaaaatatgttttatactatgttcctaaaacacaaaaattaatcagcgaggcctcttgatattgtcttatcgcgcgacgccattcagattcgtccacacacgctgcgtcatagccgtttgatcgtgggagaggtggagaagcctactacacatgcatgcctttttttattagacatgcatgtctttttccccttcttataaagttttatctcaaattacttattcgatctataatccgattacatcagtgtgtttgttataattaaatcttcacaacaagatcttacatattatattacgacgaaaaaatatttatatttataaattacttttattatatactccctccgtcccaaaatataacaacttttagccctcaggatttatcccaaaatataacaacttctccaccaacattttcttgtcaaccaatcacaacccttcaccattcacctttctcacgtaccttcactactcatccattcacaattctccaccactcacttctaactactttcttaataaccgtatccaactctaaaacttcttatattttgggacggagggagtacgtatcgtaagttacttttatcatatataaattacttttagattttattaaattatttatacattcataatgctctaagttgattatttttattattgtttttaagtcaattctataatgtatggactttaaatttaatttttagatataccatttttttctccctacaacgaatttacttctaatgttgtaacaaattatttccattttgtgctaagttacttttatgatttatgtaaattacttttagactttattttatttactttcataaatgtatttacttgaaaatcttctctacacttttgtttgtgaatttacttcacatagtttcttatttcaactcagtcataatgtaattacttttaatactatagagagttacttctattacataactaagttacttctataatttaaataaattacttttaaattaataaaatgtttcgaatatattaacatggatctcgttttatcacatatttcgagcagagtacaatgatgcaaatagatcttaaaaataatatgtgatttaaaagatataagtcattaaagatgttttaaaaaagtacaccattgtattttttagctaaagagagatttatatgtggatgaagtggtcgctaattaaaacaaaccagctatcggccgctccctagtcgcgtcctttctaaaattagggcttgtctagttagtaaaaacttttgcctatgcatgtcacataggattatacagatacacatttggagtattaaacatagtataataacaaaacaaattatagattctaccaggaaactgtgagacgaatttattaagcctaattaatccgtcattagcaaatatttactgtagcaccacattgtcaaattatgatgcaattaggcttaaaagattcgtctcgcaattttctagcgaactatgtaattgttttttttttgtctatatttagtattctatacatatgtccaaatattcaatgtgacagcataaaatattttgtttgggaactaagcaggcctttattttaggatggtgagggcgggcttatatgtgcttctgccaggaataagtccatttttcctccctcatctcttgcgcttgcgtgaataacatccctcaactggaaaactgggtataacgcctccttcttctctgaaaaccagagcaaatcacctccctcattggtttggctggcgttttcgtctgacgtggtgtcgttgacccgttgacgagctgactcagcgtggtgagacccacatgtcagtgcaaactctcctttccttcttcctcctccctctctctcgaccttctctctctcccgcggtctctctctccaccttggccagagcagtggcggtggcggtagggagcgacggtggtggcagacgatgtcggagcactgatcgccgtcgtacgaccaaagtagcgagaacacgcaggacgtggagaaggggagagagagagtcatccccgtcaccgccggtgccgccgtcctagagatccctcgccgagctcctgtcctgccaccaccgccgtccaccaccgccgtccaccaccggtcgccgtcccgtgctccttcgctatccccgggcggagaagaaaggaagaccggggagagagggggggagagccatccgtcaccacgagttgcgtggccctggagcgttgcgatgctactgctggcttcttcctgcgatgctactgaggttgaagaaagcctctgtctaggtaattctttttgggtgtagctatatgtatggcgctatatttttcatcaaaaaatagtcggtatgtatttatattgtaagtccctaaattacatacgtaattttagtgtatttacaatgtaagtcttaaaattacatatgtaaattcgaaaattacatactattacatatgtaagtggggtgtaaatgaggtgtaactactgtgtaagtggctaaaaaaatcgattgtagcatatggcgccatatttctagcaactccgttctttttcttcttttctctcactcactccatcagctgctagctttgctagctaggagtagctagctgcttgtgctcttgctgtcgagaggaggaagaaagactcgaggtggttggctgtcatgttgtgcatggctacattcagagccccgacggtgatgtcatcgactgcgtgccgctgcacctgcaaccggcgttcgaccacccgaagctcattcatttttgtttcgatttgcagtgatcgtttctatctccggcgacgtttcttgatcgtgtttgtgactgtgtgcgcgtgcaggttgagccggagccagaggagaggcccaaggtcggcggcgcggcggtggcgcatggggaggcggcggaggaggaggtcgtgttcccgatggcgtggacggacgaggacgagtcgtgcctggaggggacgatgccgatgcggcagacgacgaagcgagacgtgctgaggtccagctcctctctctatttcaggatgaagcagcctcgtgcctgcgtgccgctggtgtcgtccgcgtgaggaagaagatgggatgggggttgctaacaggtggggtccataagctgactcagctagttaatggaggagccaccgccacgtaagtgccacgtaggacaaaaccgcctccgaaaccgctgagggaggtgatttcctctggttttcagagaagaaggaggcattatacctggttttccggttgagggatgttattcatccaagagcaagagatgagggaggtaaaatggacttattccttctgccaacggaggtgtgtcgtgttctctcggccgttggtgaagccatctgctgaaaggaagcccaagaaaaagctgcaaacctgggcttgcgatgggccagaaaattttccgtagtcgcgatgggctcaaccgctcgagaccgaagggtctagcaattttgggaggcccaagtagaggagatggaacatggaaggaggacactagaagccgatgggttacaaggtcttctcctcccgctcgccggctcctcctcgcaccaactccggcgagcgcggcctcgccgccggcagcggcggcggagggggtggcatggaccggtggaccggtgtcctcaacgtcccgctctcccgaggtggccctcccttccgcgtcgccgcctcgctcgtccttactccggccaaaaccctcgccgtaagccccaatcccctgcaccgtcgtctccttcctcgctggccctctctctctctctctaatccgaggcctgattctgccaggtcccatgcgccaacgcgattctcttcacgggcgaccgcgtccggggcagcggcgacccggcgatcgagcggctgtcggacgccgcctacctggctcggctcctcgccgggaagctcaccggggaggccaacgcgtgggtggtggatgccgcctgcttcgctggttcgtttgcagtttaccgagatctcgttccgtccgtggacgccgtgggcgaccccgagcggtatgatcccactggcttcccggcggcggctggcgttaccatcattttaggacattgcattcgtgaggtttggtaaaattctgtaatttctctattcttttatgcaattagaatcattacaatcaagcgtttattcgaatactttgtacttgtatcttaatatttccgtagtagtatgtttagatacttacatatacaggagtaccattgaattactgatgcaatcgtgaattcatgaggcacattattcatcactggtttcagttatagttagtatacgatgctacaataactgaattcttgatattttgttaatttttggttaccaacacaggaatttcgcgctaacatttttttttgtcaacgtaaggtttcagcctgctatatgaatcagcttctcagattattagttcacatttggtaaagtaaatatgactttctaaggatgacttgattgggtttctgggatggtgatttttgtctttcttgcttgatttaccttttgactacatgagcagctactactgtattttttttttttgctaacgtaatgcttagcatattggatatatagatatactgccatggtgcgctaaacttcaagaactttgcttataaaataaatacttcctaaaataggagaaaacgaatgcattatatgttagttttctttttactccaatgcaatttctgtcttgatagttgtttacctactgagatgtcaattgtttattgcaatatctcactattttgagtcttcatttcatgatttcatccatttatcgtgtcaaattattgtgctgaattgctttgtactgaattgcatttcttccatgcacaatttgtggttaccagatacaatctatggttacgaaggccacaatgaagggttcatcaggcaatcaaagtcctactacatcactgttaaaatactgtcctccgaagactgtcatcctggggttcagtaagggtggagttgttgtcaaccagctcgtgacagaacttgcctgtttggcctcagaatcagcaaagatatcagatgatgtttcaggatcaagcccacctcttttaactcgcaatctccttgttcctatttcagctactgagtttttgtcaagtgcgtctgaattccattatgtggatgttggcctcaatcatgctggagcgtacattaccgatcatgcagtgattaaggagatagcaaattatcttatgcacactagtaagaatctctgttttgtccttcatggtactccgaggcagtggtctgatcctaaccgctcatggatccagatggagaaagaggtaatgctgcgcttgcttcaagatgaagctcaaaggtgtgaagggagacttgtgttatcccaaaagagatattttgatggcaaacctcgcagtctgctcatgcattttgaaattttggaagtaatggacataggctgactctatgtaaacggtctgtagcttttttactcccgtcagggatatgcatagaataccagaatgtgaatatatctgagggtcttggatactttcatccgtgctgacttcacggtatcccattccataagttgttttgtgcatgagaattcttgacagaataatcaaccacagttggattcctcatatcaaatgatgatctatgaaatgtctataagatgctttatccacctacctttccatttgagacaaatgtccacgctgaacttgtaaatggtaattggagctttccagcaaacgtaattttttccattctgacctcaagttggtcgtgatgaactgctgaatagtttggattacggatgacctgccggcttaccattctggtacgttatgctgtcacggatacttgttttttttttggtcaattttttttcctacagttcaagtgagaacaggtctctggtatttgctttgccaaattagcggcacatggtatcttgctatctactggctccattgtacttgtcaaatgtatcaagaccagtgtatttagctatatgacatttcgacaaaatcagtcttggccgttaggttacctattttgagttatggacacacgagcaaggccaaaacatgtgtgccgggcgtgcgacccatcaacctactagcaataggggggaaaacttagcaatggaggcccggcatagaaagtcgtggaattacaccatacctggaatttcatccaaattcaacttctgatcagtttcctgtatcagatgtcagaacgaactacatgatcgttccattgctggccgaattgcacagtgcagattcagcggtgaatcattcgtagtcaaaaggaagaatatcgccgtccacaccaactttacattatccatcaaacaaatcattggttatactaacaaagtactccgtaagataacaccattagtggttctgttagtaaagtagtggcactatagtatactactactgcctgctgatccgtgattccagctacactcttttaactgttcttgtctcactctctgtcgaacacctgaaccagtcaaacaacagtgtgctcgaccaagtggctgccgaattaacaaagttaaaaccggacctgcctttcatttcgttcggttgacaagttggcagaatacttcgcagtgatatcttaatcgtggcatacagtttgggggtaaattatgcctcggaatcctgtccgggcggccgcgaccggatcacggagcttggactcttgcgaacggtgtcgttgctgcctttcaggttttagacgtttagtcgcggtacaatccgcaacctctcgctgcgggacaaaactcgagtaaaaccgcacgaacggatcaaacgctagacgccatcggcgcgagtccaaaaaactactttttcgggggggacgcaatatcgcctcttgaaacggtcagttcagagaatcagagtcccagagatagatatcctttctgtaatttttttccccctgaaatgcaatgtggcatagtcaggtagtagcttatcaaatgcgtcaggttgtttggggttttgcgaagcgaatgagctcgtatactcgtatgcattgcgtggccacttctcggcgttggcttcagagttcagaattcatggacttcaggagtcctgaataaaccggatttctgcattggtttgaactctgaaatcgacctgtgaagagaatcaagcgatagattcatgcgttcaaagcaatgctgctttcttttagtaatttcactggacagcgtgacaagttgatggtcattttcctgcgacgccgatagagttttcgctgaacggggattggcactggcttcaaatcaatgcaatcggtgaattattctagctgctgtgctcgttactacccatgagacaattgcgacgggatgatgtggatgccgtggtttctagcagggtacgacagtggtaggcgtgtctgctcatttctttacagtgcatataccaatcgtatctcttttctctgcctgtctattcgtctccatccttgtgaatgtaaccacttaattacctggctctgatagcaaaatatcgtatagggacagttcgcttataaactaatccagctactgaatgaccgaattagcgtagtaatcttctgccacgattgaggacaaaataaagagtgtagagagcgcagactgcagagaagtccagtagaacaataccggtaagcaagcacgttagtcgagccgctgatgattggtcagtggtgtattctaatctggtaccctattaagtatgagagcaaaaactggaccaagcttggagaacaggagtacatactactattagataaggtgtacattatacagtgatgtagtatgtatcaggggtcacaattccgacgaaaatcggttgaattctgcgaaatttcaaggttttgatgaggcttgaaagtagaagccatatgagatttcgatgagttttatctaaattcaaatttgaattgataaaaaagaaaacaatcaaataaaatcttgtaaatagtatgatattcatagaatttattgggatataaatttttgaaaaaaatgatgtatttcacgtatttactgaaatttatagtaggaaagaaaataataacgaattaaaaaaggggaaaaataagtttacctcttttaccgattgaaatttcgattatttcgccaaagccgaccggttttcgcgagcttatcggtaaactcaagaaatttatatttaaattttggtttatgaaatttgtttggaatctaccggcttttcaccggatttcacgaaaaccgttgttccaccagagcacgaaacggaaggctatctcgaaatcgtaaaccctttatgtatatcttcgtccagttggccagttgcatgcgaacagattaaggattcgctgggaaacaaactggataagctaactcaaattaaaacgcgtggcgcggtacgcgacctggcacgctgtgtgctgtgtgcttcgctgccgtgcggtacgggtgcgtgtctggaggcaggccggccggccggccgcctcgctctcgcgttgcgttcgcgtcggcccgcccgatccggagggaccgacccacagatcacgcgcgctgacgcgtagcgagcgtccgacaaaactggacgggggccgcgcgctcccgggcgtgtgccgtactagtagtagcccgtaggacggggtccaaagcgcagcgcgcgcgacgtcgggtactcggactcgggtggccgggtggggggcgtgcgcgtgtgtggccggcgataagttggcgtttggcgcgcgtggtcaaggcgccgaacagtgtttggctgttggggttgggctggaacttggaagtccgctctagcgtttgacttggttctgcctggtccttctagcaaggtggtggcaatcacaaatttttggagtgtttgcatccacggttactacagtaacctcgtgcagtaaccgttgtggtttttttatcttagttttagtaacctcttaatttttattttagaaaaggctatacgcactaattttttcttactaaattcttactaacactgatgtgtcctatgagtgcatctaaattttttataacttacatatacttaaatcaaacggttgagataattgttagtaaaagtttagtaagaaaaatttagtatgtgtagcattgctcttttattttttagagtgtatgagatttttaccgcacggtaagtaggttaccgtggtacctgctctcggtaggagtaatccctttccaaacagtagaaatctgtcgcatggtttgacgtggattttagcggcgatgtgtgtcacctttctttcacggcttgtaaagccttgaatttggaacagaaacatagtttcattttacgtatataattttaaacgaaattcgagatttttttcacttcggttgtatttcacgtacgaccagtacgtgacaacccccaccatatattttttaatatatatagagagagtgagtgagtttagaaacaataaaatatacggcatcatcttttctcttatacttatgtttatcagctaaaatttaaattttcaaccataaatttatagctgattttaagattttttcatcgaattttattttccaaccttttattttagatcaataagaacacgtatataaaagttttattcataaattattttccgtttgcgaatatgttgtttagcttattccaccaaacagctgaatgatatggctgataattttctgaatagctaaccttcaaacacgaatggtaatccataatttccggctactgatgactttttacaaggcgctaaaaagggctaggttgtcagttgtcacgtactcctacaatctctatcagagcaaatctgttggcggcagctagtgtggccatgcatgcgtacaagctcacgcacgttcttgtccagtactgctacttctgctaggctgctacttctccgtgggaaacagtaagaacacgaaaccgagacgtgtcaagcagcgcttgagctagcggcccccctgctcgcttggcgtagcagcaggcggcggcggcggcaaaaactcgatctggtgacatgacggcatgcatcgtggcgccacggcctgctcgacacgttggtgaacggctatcgatcgatcgatcgatcgatcgtttcgtcgcgatcagcccaatccacgcacctggtcgtccggcaccgcttcatttaatcgttgggcgcgtacttcttcccgaagttttggtacactcatctttttgaaagaaatactccctccatacttataaagaaagtcatgtttaaatcaaactttaaaaatataaatcatgaataactcttaagttattgagtttgaaaatataaaaattatatgaatagatttgtcttgaaaaatactttcataaaagtatacatatatcacttttcaataaactaggaaggtagcccgcgcattcgcgcgagcatgtatcgtaggctgcatttgagatactcgtaagtaataggccgattgtgttaaaatgtcgtatttgttatatagtaaactataggcatatggatcttatatcgttggtttgattataaacagagcaatagttagattagaaatcaaacgtgaaacttataattatagattatttatattttagttaaataggaacgtaagagaaatgaaaagtgtagagcttgagccagagaggggaaggagcgggtgtgtagtgatgggcgtgtgtggaggggatttttttttttgtaatttttctaagtgattaagtgaaagccaattattaaatgtaattttcctaatatttgcaagatttttttaaaagatgtgacatgccacttatcaagatatatttttctaaaagtagattatatagttgaaaataatgttaataggtcatcaatctaggtgaaaactgttagctagatgttttatttttttcttttaatatataagattttactaatttttaaaatgtgacacttggtaatttaacatgtctctaaaaggtcatacatgatgactttgtatttttctaatttttattacgtagaatgattaagatgacataatacatattgtcaattttttaatgtttcagtgttgttcgcttgttggtctatgttaaaattaagtattttaaattttacatagtaaaatatgagtaacataaatcaacggttcaaataaattaaaaataggatgttatttgggttgtcaggtaaagaataggtggcagttcaaataacacattttattttttaaagtgaaatattggtaatattgattctaaattatttagctgtctaattatgaaacaaccgttcaaacaaactaaataaaaacagatatactacctctgtttcagtttcatattataagtcattttgaacttttttaagtcaatttttaagtttgaccaagtttatagaaaatatagtaaaattttcaaaaataaaaaacatattatggatatatatggaacgttatatctaacaaaacaattttgtgtgatagatgttgttaaattttttatatatttggtcaaatctaaagaaatttaattaagaaaaaagttaaaatggcttataatatgaaatagagggagtaaatttttaaaattatgattattttgctatgtaactattatctttttttttaaattgttagttaaaaatagatttgttatttataaaagcatgcatcagatcattaatcatttatatatttaggcatgggacatgcaatcaagaatccacagccattctcgtgagatagaagtgaagaaattaattattaagtaataaaacaaaaatcttaactactatagagaaaaaaaggaaagagatgaggagaagggattgaggggaaggaaatgagaacgtacggtagtggttgaggaatgatttttttatgagataaatccaattggcccaccagttcaagttatatattttttttaatttattagagtgccacgtggtggcttaggagtgtttataggaagtttaatgaacttttagtatataataatagatagatagatatatatatatatatatattatatgttgttaataagtatttaatttatttagatggcatgcaaacttgcaaaatgcaccgtctataccacaataacatattgcttatatatagcaaaatattggatgtaaaattgtcaatttaattataaatagagcaacgttttaatagaatataaattagctatgtacatttaaattatggtcaacttaactcgtttttaatttgataacataaaataattaagaagagaaagagatagagatataaaagaataggaagaggaagagacaggagagcgtactacgttcttatggttttttctttttccggcccatggttatacgaagccacacgtatgcacgtatgtttttttctttttctgacccacaacagaggaatggattactttcttaaataatagatctaatctaatggtctaaaatatcgagtccaccaatttaagtgaaaatcgacggtaagattatatagtgtcatgtggcggtttaggagtgtttgtaggagtgacacgtggcggattgagagcgtttgtaggaagtttaatggacttttagtatataatagatagatagatagatagatatttttatagaaaaaagaagtcaaagttgtgttttggagaccgtgtcgctgttctaaacgatttcttttacgagtatgaagagagtactatattatttgaagaataaagaatttattaaaactagactattgcgctaaccccggtaacatcgagataaagttttcggatcaaatttgccaaaatttcggcactcgtccgtcgtgcgttgatcgctccgagagtcgaaaaaagaaacaacgcagtgccgagaatcgaggtaccaagttatacaagcccaagaaaaaaatgcacacgtacatcgtacgagcctcgaaatgtacttgatggaacttaaatacggcagcacgcttcatcaagtatttcgtcgtgcacctgttcccgaagccccaatggatggatacagttacgtggagtagtcgggtacgtacggtacaagcgctggacattctcgactagctgctatgtaaggttatgcatgtgaagtactatactacgtatgtacaaacttcaaattgtacataacactagcccgtcaatgactccgttatatgaaattttggaactatttggtatatatgttgaggaaattaatcgtaaaatatagtgttattaaatttggtaagctcgagaatgtgaatgagtttttaagaccccataatttggtatagtttgatgagtagaaggttccaaaattgttaaaattttgacagggattggtaaaaacgtgatactaagatttcgttagagcatcaccaacagtatcctaaaatttcaaaggtcaagaaataatttaatcacctcctcgattgatcacctctatgtataaaaataatgtgataggggatttgatggtagaagctttaaaacaaagtaaatttagatgatgatattttagttaatgtacgcatatatgcaagttttataatattataagatacggtgagaaactgatatgcattatatttggggtggagtgaatattaactattacaaaactgtcgacgtttgatgtcgcgattccggtatttgcatagtatgagaatcgttggtactaggatatacgcgagactgaggtaaaagagacggggacaagtatttttatacaggttcgggccctgaatgtcaggtaataaccctacatcctgttggccgaagccggtcgttgctcttattcaccataatcacaccagtacaaaatttggggtagcctatctaactgttgtcgacatggcggtctgaaggtctgactcgtagtcgacaacagggtagtcttcctcctcgaatccgtgcccggcgagatcaaagatagcgctttcgtctctcctgacagtatccggagacaccgtaggggactagctgtgcctatctccgaattcgatatctggcgtcttgtcttggcgtatgttggcttgtattggcttgtggctttgtggcgtctatgttgtccgtggtgggtatgtcccctctcctcctagggggctttgtatttatacccatagaactagggaaaccaatatgtatacaatccgagtagtacttgtcgtttccatgtagaagtttggttgtctttccttatctggaactcctcctatatccacatgttgtttccgtataggatatggtatgtggtgggtcctgccgagatttagtcaactactattagttatgtggtatctataaccctaacgaaaactgaaatgtagatttatttattttttagaaaaaaactataaaatttttatacaaaacacatcgttcgataattcgagaaatatacccacgaaaaatgatggattacctcagtccatgagctgaatcaaacacaacctaagttagacaccccagcctcgttgccgatgctatgctactcttcacagtcgtaacgcacagcacacggcccccagtaggtctcgcccatgtcagcccagcacccgtgcacgctcacgcacacagccactgcacagtgcacgcacacagcacagacagaagaaaaaataattaagcgcgggatcaatcaccatctcatcttaactcgcaacgcgccttggatgatcaagcggcgccgggcaaaaagtcagcccgtgacaagtgttagctagctagccactctgcaacggtgctgccaattatggccgtgagatagctagaagatcgatagctgcagacaggaagccaggcacgctgcgatgggaacgtcgtcgatcaggtatagtcgatcgttgtaccaccattttgccaagttgcgagaccaaattaaagcatggacctgatcgagctctccgacctcgatctcttattttaccagtgaaatggtggtcacacacacagcagctagcaggcgagaatcgtgacatccactgcaccgcccgggctcgccgacttccctttcgcggtgagtacacagtagcgccccctgcttggaacccaatatgaccagttcgatttgtcgtgtcaagcggcctaacctgctagctatagcatgtgtccacagctagatggtactatatatcagtactaataagtgtgcctacacaaatctttcgtgtctatatggattaattaagttattgttgttgtgaatgggatttgatcaaaacgtgaaagtcgatcagcagggctgtatcgcggcaactgtgtgaaaccatgattttaacggggcattttaatttgtcctgcggctgatttaatttggtaagcagaggtatactactgagaatgaccttccacataaagcagtgcatacagaggatctaatattctaattcaaaacatgaaaaactagccacagtccacagaccacctcgtcccaatactttacacatggacatcatgcccgggataagatctgatttattttgatacggtacagaaggaaacattttccatggactaaggtaagtacattagatatatttatgtctgtgccacaaataattcctcaacaaatttgttggtacactgcataaattcgcatgttcaatgagtatacagaatgtgtaattatgcgaacagttgtgtgtttgagtttgtgttctagtcaaagaaaaggtacggatcgactttctcccttggtgagatcaggaaaaaaacagaaacatgcatctacgtgtaaaaagagtgcagattgagtctctctccacgtggtaggagaaatttaggaatgtcatttctgtggttcagttaacgcaaccatgcttatctcgcttctcgccctatacatctagctatcctttatacagttataactgcccaacacgaccccttttgagttttgaccgagatggggagtagaatatactcctagctagtcatctctcactgcatgcaccgtatgtacctctgtgataagttacacagatgaatgtcacaaaagttgggaaaaaggattttaatgtacactttcttttaacacgtggttcaaaaagttttaaatatttttaaaaatatagatagaataaattattatgttatatgtccctctataaacatagagaggtttaactcgatctacgtgaaaaaaggtcaaataattaaaacatgtcactgtgtgtaatattttttgtgattttaatttgatcttgcaagtttatatagtgatattaacatcacaatcgtctatgaagtctgatttttagaatttctttataactatatatttagcacgcatgaaactatggtgaacatgtttaatttactttcatctaatagtctcactattttacaaacttaagtcaatccgagctacaaaatttactgcatttaaccttgttaattagcaagggcaagacatagaacctaaataaaattgggacccaaatcttaatgaggcttgtgtccgaaaaaatgatatcttaatagaacaatcattggcaaagtcttatcttaataaaacaaaatagagaaaatagctacaaaatctactcttttttttacgtaaaatagtaaatacatctcaaccagggtttaaaatttcatttgagctatttctattggggctaccgaatggaccaaaaatttgtctgagataatttgaatttttgaacaaaattttccaaattctagaaaaaagaaatttgggcgaaatttcgaaaacttctgtatgaaaatttgaatcatgatctcaacccaaatcttttgccggttcgtacatacggagtatatattattaatattacttctagctccagtaatactaacttcactgttctatattaatatttgatatatttctaggtttgataagaaaccatatgtattcaagttgtatagtaagtgaaaagcttaagcctgctttggttatatgatttattttccatttttagagtctaattaagtcaaaaagaaaattttacagctactctaatttcggttgtgtttagatccaagggtgtaaagttttggtgtgtcacattggatatgcggacacacatttgaagtattaaacgtagactaatgacaaaacaaagaatccgcctgtaaaatgcgagacgaatttattaagcctaattaattcatcattagcaaatgtttacaatatcaccacattgtcagatcacggagcaattaggcttaaaagattcgtcacgcaatttacccaccatctatgtaattagttattttttcgtttatatttaatactttatacatgtgtctaaacattcgatatgacagggtaaaaaattttgtcaagcgatctaaacaggacttcatttttcacaccgggacagcaaaattgccacaagttatttcgtatcaaatcacacgacccaagtaactagtccctacatgcagctcgtcaaatcaggctagtagtggctttgattagtgcaagccttctctctgattactctttgctgcttaacgcggaaaggggaagagcgagagagagaaaaaaaaaatctttccggccgccaacggtcaccccctataagtagaggagcccatcttagctttctcctcgcagatgcaattgcgcgaacacctccaaactcccgagtcccctctcctctctcgtcttcctctccacgacgacctctccgcttcaattctgcgccgccgcctcagagcgccatggacttcagcggcgacatcgatgacctgatctccctccagctcctccacgatcagctgctcggggtcgaggccgacgcgtgcctcccggtggcagttcatcacgatggcgtcgccgcgttcgccgagcatcagcagggtttccatcccgcggcgttcttgccgcagcagccgatgacgatgacaccggctgggtacgtggacatggcgaatgatcagtatttgggtgcgcatgccgccgctggcgaggcggaggcggtctaccgggcggcggcggcggagccggtgatgatacggttcggcggcgaggtgtccccggtgtcggacccccggaggccgcccctgacgatctcgctgcctccgacgtcgcacgcgtgggcggcggcggaggcggtgcacccggccgctctgctgcaggcgcagaccgcggccgcggccgccgacccgaacgacttccggaagtaccgcggcgtgcggcagcggccgtggggcaagttcgcggcggagatccgcgaccccaagaagcggggctcgcgcgtgtggctcggcacgtacgacacggccatcgaggcggcgcgcgcgtacgaccgcgccgccttccgcatgcgcggcgccaaggccatcctcaacttccccaacgaggtcggctcccgcggcgccgacttcctggcaccgccgccgccgcccccgccgccgacgacgtcgacccacggcaaacggaagcggcacgagacggcggcggccgacccggacgtcgaggtgatcggagaatcatccaaatccgtcaagaccgagacgtacacatcgccggcgtcgtcgtcgctggcctcaacgacaacctcaacggtgacatcatcatccacgtcgccttccccctcgtcggaggcagctgcctgcggcggcggcggcggcgagctgttcgtcccaccgatgccgtcgagctggtcgtgggatcagttggaggggttcttcggcatcctctcgccgctctcgccgcacccgcaaatgggattcccggaggtcgccgtaaactaattaagcgcgctaatgatctctctaagcatgattaattaggcgcaataatcggcaattaattagtggcttctagttctcgacggccttcgctttggacacatctcaggagatttggcttggagcagtgtactatactgtacagaggagagaagatagtatattagcgcatgcatgtgacgggtactgaatgtgtgcatcgacataggtgttggagatacactctagatatcttgaaaataataagaggaaataatagtataggatgggtgataataacattgtaaattaattaattaaatgaagagtaaatgtgtactagtttgttttatgttcttttcttgggatcagatcgatcaatcggtgtctatccagttgtgtttgcctttttgcgccataaatttgattatgacttccgagtcttcaaatagccagggtaggagacatgtacaacgcacaagattttagtcatatgcatctagatgctgtaaatgccgtttgcgagaaaaagttccatatatatcttctgtgctttggatcgactagctctggccagaagtgtagtttaattagccacatcgaaatgagatattgtacatttccgtttagatgttaattcttgcagaaacggaaacaattctggttaacttcaagcaacaaccttatgccatacaggtcgatctcacactacaagtcatcatctagtacatgtgcatacgtactaatcagtaatcacatactagacgtatgcatacatcgatttcatctacagcgtgagtcatgcatgtgtgatgcacacagctaacaatcaagaggttgaactgagttagaatttcaaacgatgtccacacttgatttgattttcttggacgtgttcatatgtgcaataagtctaaactgtcaccagtaattctgaaagaaacacacgtacatactattgatctgtacgtacgtacttactataggtgttggtctgaatgtagtgtgtttcaaacagttgacactgatatacagtagcgtgtttaatttgtggattgcatgtgaatttttatgttgtcgccaaaaaatttaagttccagcctcctatcatataatgtcatattgatgtccacaatgtaaattcaagctagtcaaactatatgagtggccaaagggtaatacacctttaaaaagctaatgatatacggaatatgatatcagaaacagatgaggtttgcacataggtaaaaaagtttgcatgtgtttgctttgttgactacttgagtcttgagctagcatcaacccaaattaaaaatgggccttgaacgaagcttaaaaccctttagataagtctcatgcatgcatatatgcaatcatgtcaactcttgtcaagattacgtgctggtaaaatactattgagttatatcgtcaattcgtcataagtcagaacagaatccagatagccacaacaaagtgagtttactgccacatggttgctcggcgtcagtttctttgcacgactggaataacctaatcgatcatgatctaattttaattacattgagaaaggatcgatgccctacggattagtattggtcacttgttatggaagatggcatgaagctgctgcttatttttttcttacctagcgagggaacagaggaagtacgtattccctctttttttaagttgtaatttagaacactgatccaataaacatatttttaatcattggtttttctgtcttctaaatttattttttagataaaacaaatatgtcaaaaagaaaacaatacgaaagatgttatcaagaacactaatatatactccctccatcccaaaatataagtatttttaaacttcgacacgatcttcgagatgttactttgaccaataatatctataaaaataagatgttttaaacaaaaagatttgcatattatgatagtttgtttaatggtaaatctagtaacatcaatttgacatgattaatcttttttatttttttcgttattaatagttaaagtgaaaaatatttaacttgttactatgccaaaaatgtttatattttgggacgctgggagtactatatatctccatatatcaaatccttctttcaatctgtacatgcatattagagattagatattttgaggtttaattatgcatattatgcaacattatctatttgagaatggagccaatatctgtgtgttgtacaaagagatgcagtgaaattaacctcactcccgtgatttcatatatcacactaccgcatccaaactcaactgacagaaaggataactacagatcgtctccatgtacttggtccagcaagaaatttggtactgcaggacaacgtgtcgtcagtgaatgaggtggcttagcctgcatcactccaacgaacataaagtaagttcagtttcaacagtcaacggctccacgttgaagagatcaaagtgctcatctataggggaactttgttcgtgtagcattcacgtgcatcgatcccgatgcacgaggtgcagtatatgtcagcatgctggtcaagaaatgaagcattgatcaatcgatcgaccgggccgttgatgcgttgagaattataccctactacacgaacaaagggaaaatacccccatattgtggtcgttttcccttgctttccgttacagaaatcaaaacggaaatggttctaggcttctagctagctaggcgcgtactccctccatccaaaaatagacaaaccctgaatttccgtgtccaacgtttgaccgtccgtcttatttgaaaaaattatgaaagaaattaaaaaggcaagtcacacataaagtattaatcatgttttatcatctaacaataataaaaatactaattataagaaaatttcatataagaaggacagtcaaacgttggacacggaaacctagagtttgtcttttttttttctttttaggatggagggagtatctgtgtgtgaaagagacaatcagaaaccatgtttgaaacatgctggcccaaatcacatgtcaaattggctctgaattttcatggagcacagccgaacaggctgccataggacataggtactccatccgagacagggtaaaggctaaaatggccgaagaatgcactcgcaatttttctgaccaaaagtaatcgctctacaacactagcccgtaaccaacacgtccaaagttcgatacgccctactcccccgttcaccatcagactaaaaaagcgtacgacggcggcggcagcggcggcgttggtagcagcaaaaaccgacgtaacaagccgcaaaaacttaccgacccaggatcgatcgatcaagagctagcggcgtcaaccgggcgaagaaaaaccagaaattttgaccgctataatcatgaggtgatcagagaccggccggtcaagctgtttacggcctttgcggtgtgcgatcgaattgaagctgtagctagcaggggaccgtgctggccttgtcgctgttgatgcgttcgtaggcagttagttaaagcggcacaggggagttttgacgtttcatatcgtacacaaacaatactaatggcaaggtggtgctagtagcaaggtgctatttcatacagccttttgacaagttgatgaagaattggacttgagagagtagctgaggaagaatttcgaatgggtatatatggtcagagccaatcggacatgagccggttcaaagtaaacctgaatgctgtttcagcacagcctagagtcaatttaaccatggttcagaagtacacgggattcaaattgagatcctgaaactaagtttgctactagtattatcaggagtaggttaatttagtagtactacgaaacaatgttccagtaggctctagaacgaatctttacaggaaataatcttatttttctgcatattgaataaatttcttgagattaaatatattaatcttctctgtctcaacgctctcattatgtcttttgtcggagcaattaaaagtcagcgtccactgtaattttgctggctagttttagttgacagattgaacactcgaatgaggcacaaacccatagaattcacttcattttggcatcaactttcttcgtttcataatcacgagaggcaattcagagaatcagaaacagaaaggtgagaggaaagcgagaggctttacagtacatggctacatcatcaaggtcaaagcgatagcgatcgaagggctagctaatctgcaataaatacgcctgcattccaatctctcgatatcgctctatttttatttctttatgtgtgcaagcaaaaaagtcagaaatcttgttagagaatctgctcaccgttggcagattgaggctggaaccaggagatgatgacgacgacgagctcttgcaagaaagggactgcaagcagatagagggccaagaaaaatgttaaccaagagaaccttactttgatgtgcatatgtgtcttggtctgatccactgtctcctgcaattaactgcattcttacaaataattcaatggttgacatgcgatcatgaactgtcgtcagacgttgtcaaatcaaaccaattgaccctagagagacgacctctgccgtacatgtacagtgcccagcagactatcgagagtaagagtttgacttaagtttctctttattcatgtcgctctcgccatgggagaaaaactaattaaaaaaaacaaccaagaactgtctgctgaatgattggtactgctagcttcaaccttgcatgctgcacatcgactacgcgtgcctgcacaatgtacagacgctgttacgcatgtaaaatacgttgcctgaaactttggcatgcaaattgcgttgtccttgagatgaaaagaggaaataacaaaatggttgttccaaactacaaacagaaatctatatgcaagtactactaatgttttctggcaaacaatactgaatacggcgtgcgtgacaaataatctcggatcacgagttttgtacgcgtgcgtacgtgtatctgaactgttgtccggccacaaaaccccagcctccgaagatagccacacggcacactgcaaaccaaacgtgtagcagcagagtgagatcgacagacggcatcggtcggcatccgatcccaacaacaacattgacaatcagagcgaaacaggtgttccccaagccaccagttttaagtcagctactcccgctatttcagattttataatcattttagttttgatcaaagttaaactattttaagtttaatcaagtttatagataatatattaatatttataataccaaattagttacattaaatctataattgaatatatttttataatatacttgttgggttaaaaatgttactgttttttctacaaacttaattaaatatggagcagtttaatttttaccaaagtcacaacgacttataatatgaaatgattataatgtgaaatgaagggagtagctacttggcggcagctacagtaatgaagtcttcacgcaacgttgacgttctggagtgagcagtaatcgagacgctacgtcgtgttccgcagtagtcgcgctcgtaaatcgaatccatgatgcggatcgacggcatgcgagaccttgttgtcagtgtctacagtaactgccccgccgtcgatcgttttccgtggcgcagcagcagtactagtagctccaatttgcgagcccattaatgccatcagctttgccggtttgaggttaaccccgtacacacgcacgctcgctcggctcgatccgtcgatcggcattgcttctgtctctctgtgatcccgtgaaacaggccggtgatctgacaccaaaaaaagtgtttgcgagaccaataataatagggagagatgagagcttgcgaaacattttctgatgctcctcgctgggtgtaaacgcctcgcgtcgccgccgccgccgcgcgcgccggcaaggcgcgggcagccgcacaagtcacaacctctgttgctaccgcgcacacgtacgccgcgcccgcgcgcgcggcggattttggctggaggctgccgtgatctgtacaatccccgtggaaactgaaaacccggatttttccaacaacatcaaaaatttttcctcggtttccgttctaaactccaacaacatcaagatttttcctcggtttccgttagcacacttttcactaaacggcgtatcttgtgcgaaaactttcaggagaatagctaatatagtccctaaagtttcgctcctgggtcattttagtacttaatctttcatattgtctaaacaagtcctttaaatttgttatgtgggctaatatagtccttggtcccaccaaaatcaccacatggacatgccatgtcaccttcgtacgcaaaatctatatgatttgtccaatttacccttacgcataggaaaataaaaaacaaaagaaaaagttaaaaaatatatggtatatgtaagagcaaaaatatacctcaaaagggtgaaaaaaaagaagtattttttctatggttatgtctaattcacccttatatttatttttctacgatatatgtaagggtaaattgaacaattcatcatagattttgcatgaatgatgacatggcatatccatatgatgattttgatggacccaagaactattctaggccttatgacaaaagttaagaatttctttcgaccatttaaaatgttagggactaaactgatcctacagataaactttagtgactaaagtagctattctcccaaaactttctatatagaagttgctataaaaaaacaaataaatccattttcaatttttttaataattaaaacttcactaatcatatgctaataacttatctcgttttacgtgcgcacttaatcttaatccgataagcagattcgaacggggtcgaaaacacaaatataccgatatttcgattaagttctttttttataagaaaaatcgaactgaactattaagttttggtaatatttgtttggattttattagtttttatcggtttatcaatagttttcgtgaaataccgctcttgagcggttttgatccgatactcggagtcgtaaactctggtgtcatgtacggtggcggcgggctgaccgggtggttgttggtatgtgcacacggttgccccgggcgttcaccgttcgcggctgggggtggtgtcaccgtgtcagcaaggtgagattttggggtagagggccactacgtgacagctttgggccgggaaatccgaagttatatccacattgcaacgagaggccgtccagattgtatcccgttttgcaggtgaaaggtcgtagctatcacgtatgagggcgagagaccgtccaagtggtgtaccgtttccagatgaacacggtcgtaactggtatcacgtatgggagagctagagaggtgtacattagctccgacagtggcttcaggccttcaatttggtcagttccagccaaaagcaaatacattgccgctaccatgtggtgtgaaatagattatctgattttggtgtaatatttgagggtacatgtaaataaattaattactataaagtgcaaaaaatgtttttagaaagtattctaagcaacttgtacacgcaaaattttgtaaaatcaaaccgtttaggagtttgaaaagtgtatatgtgattatctataatctgtaaggggaaaagaactgggcctctgtccagggcattggagatgtgagagaaatagagaacaaatgcaatgaaaatagcagcactttgctgtagctgtagcagtactgaactttatcacaaatcaaacggccgtacaaataattctaaacggatatgctgcgtgtaattccaaatgcatgttgtgcagtgttgccatctgccatactcacattttggagtcagtccgtaatttggagtcaaatgtagcctcacattttgtagaccctgtccaaatgcctactatgcattacagtggagatgttctatctagaaagtcagataaaatggccctccatgacatgtgaaattcacttaaactctttttctttcaaagcaccaaacttggttttatccataacgagcagctgggcatcctattcaccatagaatggttgagcctaaatcaaagtctcctattttgaaacaggaatatgaattgccattatataatgataatttctttggtataagaaacaatattatcgaaacgagataggcaaatcggcaggtataaacgagtgtattacataaggtgttacataagatcacatggactaatacatcatagttcagtactctgtaacttttaacttattccaaaaacaccactgatgacacacaacctaggtaaaaacagcagtacaactgatggacaatcgcatagaggtgcaataggttcaaatccacaacccagtcttacttgctatctgcagaggcctcgactatcttgacagcagaccaaactcgcctgtaagttcaatgacacgtcatcagcgtatggcagtaaaattgtgaaagaaaaagaatcttgacattgcatcaaagcaaggtggaactctgcatccagtgccgactgccgaatgaaattgatgtgatgtttaatgaaattaaactaagttacaccaaatttcagctgtatggaattcagacaaggtcatccgaacagtctagtccttgataatgtccacagaaaataaaaaggatgattgtccaacaacagcagattacaggaaattgcatctacagaatcaaagtcttgaaattttgatatatgttttaagctatgttgagaaaattgtttcaaagtcattgctgaattcatgtagatccagctttgcacatcaagacattagtttttatgatgaaatactgcaagaatctatcttatgagtagaatggaacgagaaattggataaacaatacaataaaacacatgcaaaatgcttatataaccttagaatcccattgaaaaaaaaaaaggtgaagggagatgccaaccttgccaactcgagattcaggtaaggcacagattcaagggttaattggatccatggcatgccattgcatatttgtctagtcagaaaaatgccattacaattcgtctattcgtagccgtgccactgaaattttacaaaattagaatcgtgccactaccgtcatgttttccatccatctccttgatttttcatcttctttatccagtcttctctctcctctctagatcgccggcgaagagagcaaaccaaggaacccagatcgccggctactaccgcctcgacgccgccgccgccagcgacgctccccattgcggagctcggaggagtgcgtcacagcgtcgcgccgacgcagtagcagcaggagggccctcgccacacgcggagccatgggtggcacgtgcagcacagccctagggaggagggtgctccccgtgctgtcgtcgctgcagtggctcgtgctcctccacgacgcctacgtctcggccatgctgtggctggcgtcgtcgccggcacgccctactgcaccgcgggccagtattccttcgtgcggccgcggcagctcaaggagtacggcgagaaggtgctcgtagagatctaccagtccatgctcacgcatggcgtcgtgcccatccctgtccccgccggcggccaggccgtcactgccgtcggcggccacaactatccggctgcccaaggctgcctgatcagcagaacaaacaagtccgttcctctgtaattcagcttgcgaatgtaatttgttttcacagaaagcatctcctcctgtttgcgaaaaaatctgctcctgctcatagagaagaagacgggagaaagaaggaagaagacggaaaagaaaggagatggatggaaaacatgacggcagtgtcacggttctaattttgtaaaatttcaatggcacggctataaatagacgaattgtaatggtttttttctgaataggcaaatttgcaatggcatggatccaattaaccccaggttcaataggggaagagaacccatgtagtttgagccatagaaggattatcttgatacagtttggatgaagggcagacatcacttattcactttcaaactactgtaagggatggaactgtttggtaattgggttgtgtttaatgataaagcaaagacacagagagaaacttgatctgaaatgctctgcatcatgtactagtaaaatttaagccctatctgtttgctcttagcctctgggaagccacagctctcagaaatggactatcaacaatgcatcaatttaaacactgcatgactagggtttcaagtttcacttttcaatgtatgaaatttcagccaagcattatttcaaaatgagtagaaaaactagctcatcagacaatcaccagcatagtagaacactcagagcagccagaaatgtagtatcaaatcaaatcaattgcttaaagatggacatcagcaaactattccaagagcaacatacagtacaacagcaaagtgtgctatacataaatgtacatatttttcattccaacactgcagtacttccaatgtgtggtgattacccagtgcttaataggctacatattatacactagattagtatcatggaacaaaatttctcagagaacaataatatttaaaatcacacaactgttgtaccctaaaccaggttacctagatatagtatattgcaataggtgctattgcgctagagctggaaactaccagatgcagttggagaacaacatgcataaatctgttgctccccaactgttactcctgttatcgatcaatcctggggttatagtagcagaacttacataatagaaatcagtaataaaagatgaaattttgttgcttaataggaattagaacaaaattaatatgacgattgaaatgtcctacctttccctcacgcagacttggatgcgatcattccggtcttccgggcataggcaaagatcccgcctgcctcaataaccggcccggcatcgccgataggcttcagcttgtactgcttgccggatgtgtggttgatcatgacgcaattatcaagttccaccgtgaccacatccccggtcttgcactccttccaggctccagtgtccgctagctccaacgggtagacctcaccggtggccacggagttgcggaagaagatgcgcgcgtagccctcggccacgacggcgcgggcgccggcggcgcccagggcgacgggcgcgtgctcgcgggaggagccgcagccgaagttggcgccgccgatgatgacggcgtagcgggtggtctcctcgccgggggcgacgaacggcgtcgggtaggccgcggtggggaggccgacgaaggcgaacgagccgagcttgcggtactcgtcgggcttggacgggaccagggtcaggtgctcggccgggatgatctggtcggtgtcgatgttatcccccacgacgaagcactcgccgtggaatacgccggccgacgtcgagtcccccgccgcagcggcagccgcagccgcggcgaccacggcggtcaggggacgactgtggtggcatttcagggcgggccggcagatagccgcgacccagctgcggcggcggaacgtcctcgagggcgtgggacacggtgccagaactgctgtcaccggcgccgcctcggccaaggatagagccggagccgccgccgccgccgccatggtgttcagtgtgtgagggagaacccgaaccgtgagaggcttagggccggggaccgtgaagcaaaagaccattatgccccttctccccaccggccttgggccgtaacgagatcgtgggctgcgtgaagccccattattattaggccggagcgggatagttgggccagaatgggagagtgtggcccatggctgtcgtcagcacagcacacgattgttgtgctgctcagactttacgatttgaattctgctccgattttatttttttcccgactagaagaaatgtccatgcgttacaacagataaatgctattttaattttattactgttatacggtttatttaaagtaaaattcactgtgggaattcgtttggatatatattttcttagaaaataatgagctgcagttaggaatctgatcgtctaaagttagcatgcgagtttttttaagggatttctatacgactcctttgcatttctaaaagcaaacgaacttaaaaatcgactcaaatacggatatatattttcaaaagcgaacgaacttaaaattcagactcatatacgaattacgtaacaaaataccagaaaaacatcttcaattttataatagtacagataaaagttgtgctccgattgtgcatgcatgtgctgatttggagggagtgatattgctgcagttttttagctgcatttgaagactcactttttttttcgattttaaactttgatgaataatggataatcgagtttaaggttgtgttctctaaagttttgatggataatgattataaataaagtctataacatttcacataaataagagatttaaatattagaaagttgatttaaaagttcttttttttaagacatgttggtaaagaaagtttttgtaaagattatgccatgtaaacacttagcaagctcaagtttttgataaaatataaggagagaactccgcgttgggcacccgatccgggaggaaaatatcgggcactagctacaccatcttatctgggcaaatttgcatgcgtccgttggattgaagaggctctctccatgcggatgaggtagatttacgctcaggcacgcagcccaagaacaaaatattttaaactttaaaatgttttttcttgtaaaatatttatctcatttatgatccgagtacaccgttaaattcgttatgattaaatctttacaacaagaccacacatggttatattccattgaaaacaatatttatcttcttagtgatttttaaatattgcaccacgttttataaagtttcaactactagtattttacgatgcttcacctgtttaatttataagcgttgcagttggttttcttttagtgtttcactaagtattttataatgtttaaacagttagtacaacttaatattttacacatgatatagaaaatgtttcaataacatcaagcttcagacggttaaatatttcagttgactaccggtgaaacattgagatatacatggtaaaataaaaaatcagtcactgaaacattattttttttaaacacacagtgaagagacacattgaaacatattgttatcgcgtatgaaacattgagtgttaacaaaccgaaacatatggggtttttcatcatagtataatcatatgatatcttgttgtaaagatttaattgcaacaaatacaacgatatgatcggatcatagattagataaatagtttaggagaaaaatcattttgaaggtcactagatgcatgcaatctagaggagagagagaaagtatgtgtagttaattgtgtgaattttatgaaacatggtaaatgcgtacattgaaccatgtccatatcacgcatgaaccattgagttttaatagtttgaaatatatgtttttcttttatcagaatataactatacgatatattgttggaaagatttaattacaatgaatacaacggtgtgatcggatcgtaaatcggacaattagtttaggaaacaaatatttaaacaaaggatgtgggaagctataaactagctagcttctagctatagcttcgtgcatgagcccgatttttgttggctcaatcaatgtaccgattcaaggcattttctaaaatataatcatgtaatatactgttgtaaaaagatttaatgtaacgaatacaattatataataaaactatagattagataatagtaaattagaagaaaaaaatttaaaattttgttatggaaattattatagagagaggtcagagagacaacgggtatagtatcaagccaaggacacgagctgcgaacaaaaggggaggaagggcacaagatgttttgcgttttatcaggcgcatgatgcgtagtctcctaaaaaaaagtgaattggggaaaaagtggccgccctcgtccgctgcatggatccacgccctagccttgcccgttgatggtgggcgggcttcgccggcggcggggtggagatggacaccgggaacaaaggcacggcgacaccggtgctgctcaacgtctacgacctgacgcccgccaacgattacctctactggctcggcttcggcgtcttccactcgggaatcgaaggttcgattacatgcattcttctccgttccccttttatctcttgattgggccaaatcttcatcgtgttatattggtcgccactctgttgcaaaaaaagattgatgttctatttctcgaacaaattatcgatcatgatgatgctttgttaaaataaaaaatcattttattattctgctgtaggatcaaattagatgtttcagtacctattgcaattaattgtagggcaactcagttttgctcttgctgatggacgtacagtaataatggggaaaggggaaaacagagacaatgtaagtcttggtagcaaatggtagcaaaattggaaggataattatgcatgtagttagtttttaatgctatttttcaaaggaaaatgatcacttatgtcagaatctcacgaagggaaaaaaaaacactaaaccgtggcctgccaagcagtttgcaatgcataggaacctcaaaatgaatcatagccctatttggatatatgatttctactatccggctaaagcaagcacggcgcgtttaaaattttttttcttatcgattatatttccctttttactatctgactgtcatgtcgtgatctaggtagttcacagaattatgaactcaagttgttatttatttttcttgtctcaaatgagcagttcatggcatggaatatggatttggagcccatgatttcccatcaagtggtgtttttgaggtggaatcgaaaagctgccctggctttatatatagaaagacggtgtggctaggcacaactgacatgtcccatggagagtatcgctcgttcatcgaaaagcttgcagggaaataccatggcaactcatatcatttggtttcaaagaattgcaatcacttcacggatgatgtgtgtaagaacttgactggaaaacccatacctagctgggtgaatcggctagcaagagtaggttggtattgctagcatgtgttttacttcctgaattggtgaacatcgtaagcaattgaatttttttttttgattgaatctgtaggttcattttttgattgtcttctaccagaaagtgtccaggtttctcctgttgggcgtgtcccaactcttcgtccagtagctggtcagtatcttcctaatttttccctctattgtttccttccagaaaaaagaaatcctctgttattattatatgtgatgtacaattggtttttgttagaaatttattaaccaccagttgcagtcgattgattggtttcttttcatgatccagatgatgatttggattcaatatccacagttagtgacaacaatgaggaggacaaacacttgctgccagcaccgtcgaatgacctacattccgtagatgtaccattaaagttagccaaagatgttctttgaattgtttcatattttcacaaaacatgccatattatcatcgcaagtgctgcagtcggggtgctgaattgtttctcgaggtgacttcataggacaacaccgttgagcagaggttcccgttcgtgatactgatttcttttttcagagtttcctgtccaagtaggtacactgtatacaaataggaattgcccatctttccagctatttgttgtttcactatcgtacagtgagattgttgtatcgtccttgctacttttttatggaatatcatccatgctactttggtagcaatggtatgacattagtccatatgtcatggcagagctggaatagacatcgtactatgggctatatacttatatttttctattagccttgtgtaaaaattgcttgtatgagctcggaaatgagaatacacactataacttactatcattttgcatcattgcatggtcaatgatttgtgtaatcatgattggttttgttgtagtgcagatgaggacaagaggctgccaaacctcgattgatttcaataagctacacatgaaattataaataggttgtctacataataataccagtgagttccttgcaaaaaaatattatcaatgaattacaatagattagagattatgattagaaattacaataaaattggtccatcagttggcgcgcttgtttattccttgcccttagcccatatatgtaatttgcatctcctttacaatctaggatatttatatgattattacaaaaattagttaaatgaccataaaactctttcgtacaatatattaatggttttgaaatttctaatttaatatgcaacggatctatcccgaagttccaatcatagtagagaattccattatattttaaaatattaaaagccctttaaatttcctcttttcatttgtcatgcttactagtaaaggtactattcacgtccatgtttctcatatcactaaccaatatttagataaaataatattaatattagtgtaaatattgtagtcatccattgtctagttgtatagtaaccgcacggcctatttaatccaaataatatagaatgagatatttcatccaaataatatagaatgagaatcgagtcactttatctaggttcctcttctcgatagttctgcactattcacgtccatgtttctcatatcactaaccaatatttggataaaataatattaatattagtgtaaatattgtagtcatcaattgtctagttgtatagtaaccgcacgacctatttaatccaaataatatagaatgagatatttgatcgaaataatatagaatgaaaattgaaaataatattaatattagtgtaaatattgtagtcctcaattgtctagttgtatatagtaaccgcacggcctatttaatccaaataatatagaatgagatatttgatccaaataatatagaataagaatcgagtcactttatataggttcctcttctcgatagttctgcttgaagttatttctttgtttttttccacaaagcacacaatggatctttaaaagctagatgtgctcaggttcaccaaactgttttggatggggttaccgccaccccatggtaagaccccacggtaagacggttatcgtggtaaccgcggttacagtgaggtataatgtcacaatatatttgtaacatattttaaaaacatgataggatttgaccaaataattatagttttgtgacatttgtactaaatataattattgtattatgtatatacaaatacaactattatttttttcattaatcaatgtaaaatttttaggcgaccaaagcaaacacagtatcattgctaagctatctttatcatataatagatagattattttcacccattgcaacgcacggacattattgcaacgggcattttgctagtaatttttataatagtagaagaagagatagggatagatagagaagagattggctgaggttcttgccgtttcttatctatttgaattggaattcgcctttgctctgttacttgtaatcaaaccctcctttcaccggttctggactctagtggtaaatcctttttgtacttgttctggactctagcggcttatgccatctatgagagttcgagttcatcccaaattataaatgcaatgtcgggtttaactatacccaaattataaacgcactgtcgggtttaactagacaattgcaatgtcgggtttaactagaaaattatttgagccattttccgatctcgagcagttctcttcagctaaactcgatcgagaaatcttagggcagcttggcagcttgaatagtacatatacacaacccaacaaatgtttgtatggaactaatctaggaattgctattgcgtatgtctgtctattaatctacctttttaatttatattatatgctactcacatgattttttttatttatgtttaatttgttctatgatgtgcatcaattgtctgacaattatttttgggcaacaatggtgaataaataaatcattttaagtgtaacgatggtaaaacatttgacattttactttcataagcaaaaatctggaatcgtgcacctgacattttttagtatgatcttattttctttgatcatattagcaatgtatagattacaagtattttaaatgaaatatgttacgtgatatatactcctaataatatgcatttgcacatacttctaaatataagatagaataacatctcttattacacgacttatgcatttgcaaatacttctaaaaaagtgttgcctaacacaaaatatatacaattgtagataatgtaagtgggttgaacaatatatatagtgtattatgaccattaaattcataacaaatgtcacatttatattctttatataaaaactatagatagttataggactatctatatataaataataatgcatacaaatcttattaccatacaacatcctaaatactttttggaaaaaaaaaatctctcctgatttcaaaaaacgagttaagcaacatagatatataaagtattatttgtatgtacaatatttgcaaataaaataacacaatcttatatgtgaaaataaattatatacggtgactacagagcttgggcgcgggtctacttacactagctcagggtgcaagcataagtggtcggagctagtggcattgttattgaagatggaaaagagcaagcaaacaaaatagaaaaagaaatgaagggacaaatccttaatttcacactgcattatggcaaaaagaatgaattggtattacaattatgaaatcccacttatattagtaattagtcttaatttaatcatccaaaacaaagtgactattaaatttactagctgacgtttgatatgcttttttttcttatttagccggttacgaatacgcgttgccgttgtattcccaacaagtgccaacaatactcgcatatccggaccaaattttctgaaacaaatgcaggcggcgtcaacactcaagatttaaataaatcaatgatgaacatttacaatgacataccggttatattccagttacaacgaacaacgaacatgatcataatacataatgaatgacgaggcatctgcagcgagttttctatttctcctgtatatatgtacttgcctatcagtttctcctttttagtgccatttatcacacaaccgaaacctggattttgcgataaacttgctcaccaggctcggcaaatcagcagttagcaactgacgttcctcgctcaagcttgcttctagatatcggagctgttttactataggacgaaatggtcgatcatatggtttatgacatcggcaccttcgctatgcataacgggatctttgacctgtccaaatttcatttataagcatgcgttaatctcagcgctatgtcaacaaacagaaactggttgctaagttaaaagaaaactacgagtaaataatatcgactctgtttgtacacagcatataaaagaacaaggcttagacgggcaaagagatacctgaatcacactatgtgctgcagatcttactttgctgttgtggaagctgacatccaccttttcccacgacacaagcttcagacctcttaaaagccgttctggaaatttcagaagaagttatgctcatatggacataacacatggcataggaaataagagcaggtcaggtcataatatggcttatatgatcacttggacagaacacttctgtagtgcatattattgttccaattcgcagaaaatattaaaagcctatcggaaaacgaggacagtccaacgacatcatttgatttttggaacaccacacgcatgttctaatatattgacgggaaaagtttttgcacattcacgaaaaaaaaacatagtaaacagacagatacaatcagagtactgtcgttgagcatggtctcatttgcaaccatacatatggagttatggacattgttaagtcacaagaatacaagcaacgtgcattctgtatagtcggggggggggggggggggcatgtatgggagatcgcacgctagacccactcagcaatgcagccatgtcctggttatcccaagagccttagcaaacttagaagaaatagcttatttccattttcccaaagaaagaactataactaaagaaagaggtcaccatatgtcatataaacatgcataataagtagcatcccaaaaactcttttctttcactaggtaaaaacaacaatctaattaggaaaatataaaacatggaattacataaaccatggaaaaatagttatatctatagcactgaatatttatcagaaatactgttattgataatatgggattacaaatattaccaaattttgaatataatcatgttgatccattatcaatcaaaacaataatacaaaccttctaacatgcagctgtccacatcggcaacatcagtacattgattcattgtttctgctttggatagttcttcatatacaatatgtgggtaaatcttgcttcctgaatcagtccactgaaatagcaagaaacgcgtatgtgggaaaaattcaaggttcagtatacaggccaaactaacaaagtcacaaaaaagtagccatgggggtaaaccttcggtagctcagaatttcgcctgatggatgatgttctccacccaacaatatcttagtcaacatcaagttatggaatgatattttaaacaatacttagtactaaatgtatatttagtcttttagtagtaaaagaaaaggatacgatcatgaccaacattggagtatgcaactcttcgtttgaatactttcagagcagacctaaaacaagaagttaataaacttaacagtcaaatgattcatgatccaagcatatagatccaaatgatgggggaaaacatacatgaactgtacgcccccccaatcatccaccatgcgtagcaacaatggaggcttcccatcatcattgtccataagaaatagatgcttgccagtttttccgaatatcaaatgaatgatgtagctggcaaaagtttctattgcagtaaatccaaaaaggaaaggaacctgcggattgaatttcagaacaaattaataatgatatttcaacctgaatataaccaaagccatatgtatctctacaaaagaagagttctctgctgattgcatggttgatcttggcatcacaatattgattaaagaaaccttagcaacagtactgagtacagactagcatgtgcttaacttgaagaaaatgtacatgtcctggagcctggagcatgaatgttcgtgcaagtatagcaattcagagtaaggtaatatactatattcatatcactaaaagcaagtgattgttcaacctcgaaagttttaaataacttatcaattcttgaattaagtacagtaaaacaaggtttaagtagtacctgtttgtttcctctagaaccaagatgcggtgacgcaacagttatgaagttcactgcctcaagcccatgtatagtacccttattagtgttgttcagattctgagaactttgggatgtttgtttaggtggcctatagagtcttccaatagcatatcttgcaaccaatcctccaacagaatgtgcaacaaaagagatctttctgatctgtggtcttttgttggtttcttcaacaatctgcctttctaaattttgtcatgaatttgggaaacaaagacatacatactcagcaaataagcaatatgcacaatgaaatcactgacctcttgtgccaaccgctcacccatcacatcaacgccatctaaagttagcttgtacatgttgcgattgctacctacaaaattaaaatatcactgaagtaaggtaaccataatgaaatggttcaaagcaagaaaacatccatcttaattatggaacatatgctgtatgactccagcctccaatgctgtagtgcaaatacaaagacacatatgattgtgcattgactgggataacaaagttatctactatatttgaatttgtgtttcacatatggaaagcaaaataattatttgcaacaatccccttaatgaatcataactttgtaactgttgctcacaggtagggacatattctacaagcgcaacacaccttggtgatcttgttgcaatgaatgatttggaaagagtgcaaagttaggatattcaatggttgtttgaattggacaatagaggatattgtttgggtgatccgtgaggaattatgggtgtgcaaggcagccgagagtctgttgtaaccgcgtagaggggcatgctccctcttgcagtcttacaagtagcctctgagcaaggagatcccaaaaaacatggaagatgaggtaaaattcttttcttttttcattatgatcaccaaaattgcaaaacaaaaaagatggcaccaatgagaggtgtccattgggcacattcccatcgtatcacactttgtaagttgtaacaggtattgctattagataagatgccataatggtcttactgaagtatatatagaaaagtggcagtacaattgctcaccaaacaccattcagaaaaatgatatacacactcgcgaatagggagaagcttacgatgaactataactttgtctgacagcaacttttcaaattgctcagctccaaacttccaatcagctgcactgcacagatgaagaaagaaagatcaatgcatggaacagacaaccaaaacgatatacagaagggtaaaaaaaaccagttagcaacggggctcagtgatgcactaatatatggctgaaatgtgcataagcatcgtgctatactgcaaccaggtagttaagcactctcgattctcaagcgattggtatggatctaattttgcgtgccttgattggaaacgccgacctgcccaatatgaaagaatgccatagcatctaagggatatctcaaattcagtttgttaactaagtgcccaaatctccatattttctgtccactgtccagcaaaaaaacgcgcgagcccgctgctcacgcttgctatagcgatacctcgctgaagagaattcagagaacactgaattcagagagcgcaactgaacccatcagagaataaaccatacaaaaaataattacttgaattcagagagcgcccccgagccgaaggccgaagcaattaagcagccaaaaattacggcatcaaaccaaaagcggatcagcacacgagccccccacgagcttagtatccattacctcccgacgatcccgtggaccatgaccaccaggtggtcgggctcgggcccgacgccgccgcccggtgcctgtgcctcctcctcctccgccgcggccgcctcatgccaggctcctcccaggtcacccatacctgccaagccagccacgcaagcgcgcgccgcgaagggggaagcgaggaaggggggagagggaaaagggagaggagtggtgggggggaaaggggaggcgcgtgttatagcggggaggcgagagagctcgagcgagtcgctcgcgtaggtggagacgacgaggggaaacggctgggaggggggattcgtccgttagatggtgacaggtggggtaggatgtccgtgtgggacccatttgtcaatgacctgcggcggggcggggcggggcggcgggctgtcgcgagtccgcgacctcgcggggggaaaaactgttcggcctcatcagcaagggaagcgcgaacagccaacgatcggtccaaccagaaggttggtaaaatcacctttgcttgcacctgcaccttgcatgtttggtaaggagtactagtttttcaccttaatatcttaagagatatatttggctcctcatcggttgtccatatattacttaactaaaaaaaatattcatgcggttgtaacaagtgaagtttattttaatcttacgaacttgactcatacacggatgacatactcaaataccgacaaaaacatcttcagtttttataatagtagtaataataagtcaaaacagcttattagagaataattattaatttgtaggtaaaaattttatatatgtgtttttaacgacttaaaaaccaacgctgaaaaagataccacgttgaaaatatcttaaaataaacttcaaaattaagtttgaaaatttaaaattttgctttggttttagtttattaggacaaccaatgggactctttgatcgttttattagttataaaccgttgtgagtaatactcgttggtttcatgccgatcgccctattggtgacatatactgacgtttcatgaagatctatctattcaaaatctacttgcacatgttgataaactttttatttcttattgcaatagaaaaattacttaatattggcagcaatactttgaacttctttagatatatgaactaatagtatcggtttgatgtggagttcacaaaatcattagctgatcgaaaactgctctggagttgttttcaattttcatgaaaaccagttgaaaacagaagtagttcagataaaaaactgaaactaggttttactttaatttgactgttttattgagtggtttgtcaactagagccaactcaaatctcgtaattttacaaaaaccaaatggttttcatcggttttttcaatccgggtgtgatatttgtctaacttaggtctcatttgaactagtagcggataaagattaattggatttaaattattttaatttaaaaataaatttatctaatatttgaaagtaatttctatataaaaagttttcacacaaaatatattatttaccagagtgaaatcagtatcttaattaaaaaaaaggagcagaggagaaaatgtatcctattaattaggatggacgaagcagaggagaaaatgtatcctatatatctaatattacgatccaaggagggtggaaattggtgacatcaacaggctgtgtgtaccatggcaatgtacagcatgtgctcacgacgcctaagaaaagggcgaatttgtctttaatcggtagcgtgtagaagcactaagcactaacagcaacaaaatgacccgttattatgcggtgtctaggtcgtagaaggcacgcgtcgatcataaataaattagataaagcgacaaccgaggaagaattgcatgctttgtggagtactgacaagtgacatttgatgactaacgtcgcttctctctatatctcaattcgggccgtgtttatagatttattttatttcttctaacttccaactttttcgtaacatcaaatgtttatacacatgcatagagcattaaatgtggacgaaaaaaaccaattacacagtttacatataaatcgtgaaatgaatattttgagcctaattacgctatgatttgacaatgtggtgatatagtaaacatttagtaatgacagattaattaggtttaatagattcgtctcgcagtttacaggtggaatctataatttattttgttattagtctacatttactacttcaaatatgtatccgtatacttaaaaaaaattggagcatttgcaaatttgccactgttttttctaatattgcaaggttgccacttaaatgatagttctagtggcatttttataatttttttagtggcagttttgcaataacgattcaaagtagtggtaaatttacaattgcctaaaaaaaaattttggcacacgaaataaacacagcctcgatcgcttcctctgttcttttttctaggataacttaacatcgttctgaaaacgtaggatatatattcgttgtgttaaactatacttgtcgcgaaaggaaaatggaattaacagcataagagctcaatgtcccgtaaatgacaaatgaataaaagctagtgattgtgtagaaggcatgacaaatgagttgatggttgacagccagagctgatatgatttcgcccgattaatatcgcaaccaagcttgttcagtgcacgcaaaaatagtgtgctagccaggaccacgtaattgcgtgcactaatcctcgaatgcgaccatggaatagaatgaactagctaatcattagaatcctcaacgacctagaatttcaattccatttcgttcgtgtggatgcttaagcctacaaaataatattacgtccgtattttaatatatagtattattaactttttgaaatatgcattcatcctataaaaatataagtcatgctaaaaacctttagtaataaatcaagtaaataataataataattttaaaaataaaatgaatcatcaaacttattttaaaaagtaaagtaaattatatataaaaaaattaatggagtactttgaaatgccgtttaatgaccgagtaatgcttatgaaattcctctgaaaaaaatgagtaatgcagatgaaatgaccatttcaagtagccggaccgtttctttttgggtcagcgttcagattacccatagacacagccacacaagcatcttaattaacacaatacaaatattctctccgtttttaatacatatgttatcgttggcttttcaacgtgcgtttaaccattcgtttcaatcaaaaaatttatatgattattattaattttattgtgatttaatttatcatcaaatgatttttaatataacttaaatagtgttatatttttttaaaaaaatttgaacaagataaatgatcaaacgattttcagaaaatcaactgcatcgtgtataaaaacgaatggtcaaacttttttcaaaaaatcaacgacatcgtgtattaaaaaactacagtgtgtgtaaccatgtgtttgagactttgagctttgaggcgatgcgataaaggcagaggcttcaaagtggacagcgaccgagaacgacgataagatttgcgacgccgcggcgccacgtcaagagatagtaggtgtccccattcggtaggctgtttgggacctttcgaccacaactcccacacactatccagcgctggcatcctcatcacggcctgatcaatgatcccctccagctgatcgagatactaactaactgaaattagctctaactactccggattacttaagttgatatgatcaccatggctagattatcagagcatcaatatgtatctttgcagagccttgcaggccagggctggaaatggcaataatgtttttgcttaatcctcgttgattgggtccgtttcgtcgcatgctgggtcatggatcatcttatatcgtcgcttataagattctttttagcattctcttagcctacctagtaatagttagctctttactatgactataggacctacttatctttctcatatagttttttttggttccggtgtccgaaccgaaagtttacagcccgtttttcctctcttttttttttctctcctacacctcggcatttagccggtttatagcgtaccattatacttgctcttatggcttatccgcttctcatagcttccacgtcaactgcaagacaggcaggtacggcgagaggcaaatcattggcggtttttgtagtggattggcatccaaacaccagcgccaaacataaaacatagctgtcgttcgccctgtccacgatttcacgaatccgtatgcactccgctgcttgagagcggtttgccaacagccaaccaactgctgctgctcggtgggtgcttaattaattttcgtcggcgtcggtgtcagcggcggcagaaagcgttgaaacacctgaaccgaccatcggctctaatgccaaacgatggtcgtcgtgccgtttgctgagtagcttttggcgctggtagtgcgctactactcggtccatttgttggaagaggtcgcatattgcatattgtttttttacttgtgtggcttgatttctgcaacttccaagctagaaataataataataataataataataataataataataataataataataataataataataatatactaaagtagatatcccgttcgacgaaatgatacttggtaggtaccagctgatgatacctcttagatatcgtcttatgtctaataggaattagtcgatagcatatgatacctgtaaagtaccatcccatccaaacgggttaacatcttatagcatttttttaaaaggaaattaggcggcagtttttttttcttcttttaaatgtaatcttcaaaggaaaaaaaagaaacatttctaaagatcttgcacgaagcaaggtttgagtcagtggtgggtcttgtggtatgttcttttgggcccaactggttccagtaagaaataagttcacttaaggtcctttaacttttcaacgaatccaattttcatccttcaaccggaaaaccagatacaatgggtccctcgactattaaaaccggtacaaaggaagtccctcaacggtttctatggtggttttgattgacgtggcgtctacgtggctgctttgacttggtccttgtcctacgtgacgatgatgtgacactataagcaaaatataaaaactaaaattaaaaacaaaaatgtggagcccacgtcagacagacaaaagaaaaaatagtgagactcacaagtcaatgggtcccaccctcctatctacacacagaagacgggagacgagagaggagggaccgacgcctcctcctctgtccctcctggccatccttcctcgtcggccgacgagcacgcgcagagagggagaagggcggcagccagtgagaagaggtggagattgacgcggaagacgatcgctggccgtcgccccctgcgcgcctctctttccgcccgtcgccgtcgagccctacccacgacgccccgccatcaccggcctctctgcctcctccctccccacccgcctcaccggacgccgtgcgccgctccctcctctcccgtctcccgccggccaccgcacgcccatcctctccagttggccgtcacacgctgctctctcctctcccatctcttgctggccgccacgcgctgcttctttcccaccggcaaccacgcaccactgcctgcctccctgtggccggacgatgttgttcatcggggatccctgctccagattcgactgtgatgcgagaggaagtcgagcgcctcgctggcgagcgacacatgcttgccgagcccgccctcgcctccactaccacgaccgccctcgccacctcccacgcctcccctgggttcggtcttgggcgggctcgacaaagcctggagagaggagaggggagagagatgaagagaggggagtgggagagaagaggaagaaagaggggtgagaatgacatgtagggcccatgtgagccccatcacggtttttattattttccaaatcaaagtgccacttaagcgtcacgtcaataccacgtcagattaagacagagtcaaattagccacgtaggcgccacatcagctgaaaccgccgttcaaatcatcatagggcttatattgcactagttttgacaaataagggacctgttgtatctggttttgagagataagtgaccgtttatctggtttttggttgaagggcaaaaatcggattcgttgacaagttaagggacgtcaggtgaacttattccttccagtaaaactgtagctaataaatgggccttacaacttctcaaaaattgggccatgcaaagagatctagtaaatgggcctcccttaagaaaagctagtaataatgagcccaataatgacttgtaccagtccgaaggggactctgcgcaacccggtcccgaccgaaccacaccggatgacgcaagagccgacgtcactcctccccgtctgggcgcgggcgccaacgcggaggcccaagaccacacggcgccacccgctccacctccacgaagcagccatggaggaagaaggcgcagaccaccggcccccctcctcctcctccggcggccgcggcttcctctccggcctctgcgccgccgcgctacgccgcaagcccatctccgcccacgcggcccacgccgcctccggcgagggcctcgtgcggcagctcggcgtcttcgagctcgtgctcctcgggatcggcgcgtccatcggcgccgggatcttcgtcgtcaccggaacggttgcccgcgacgccggcccaggtcaggcccaaacgccccctctttttttcctcgttcgcttcggtttagagtccgcggttgcagcactctaatttagcgttggagcaactctggtcaacttgttggcgccactgggctacagtacaatcggctgcctgcatatgacattgacatatctattgcaagaattcagcagtgtagcagccaggcaggcattagggaattgctaggcagtttgatcatactgctcgtagtcgtaggcagtagttggttaaacatatctattgcaagaattcagcagtgtagcagccaggcaggcattagggaattgctaggcagtttgatcatgctgctcgtagtcgtaggcagtagttagttaaacatatctattgcaagaattcaacagtgtagcagccaggcaggcattagagaattgctaggcagttgatcatgctgctcgtagtcgtaggcagtagttagctaatcgctgctcttttatataagcagatttgtgtagtggccatttacggactgccttattgttgttgatcacggtgcaaatgattggtagttgatggccacatcaaatcaattgcctctttgcactttgcccatttcatcatttccgctaaaacttacatgggtgctctaagcaggtgttacaatcagttttgttcttgctggagccgcatgtgtgctcaatgccttgtgctatgccgaactcgcatctcgatttcctgctgtggttgggggagcatacttgtacacgtatgcggcgtttaacgagctcaccgcgttcctggttttcactcagttgatgcttgattatcatattggggcggcaagcatagctcgtagcttggcaagctattttgtccaattccttgagctaattccattcttgaagggccatattccaacttggataggtcatggagaagagttctttggtggtgttgtatcagttaatatattagctccaattcttctcatcatcttaactacaattctctgctatggggtcaaagaatcatcagcagtaaatacctttatgactacattgaaggtaaggctgcgtttatggggttttccctgcactaggatgcataactttgcagctttcatgtgtttaagtgagcttatcttatagcattaccattaggcgttctatgactatgaattatgatatataaatttctgcatgcacatgaaggtttattttactttgttgatcaatgaagtggtgttcttgtttccctgatgcagatagtgattgttatagttgttgtatttgctggtgtctttgaggtggatgtatcaaattggtcaccgtttatgccaaatggtttcaaatctgttgtaaccggagctacagtggtctttttcgcatatgttggatttgatgcagttgctaattctgctgaagaggccaaaaaaccacaggtgatttcagtaactacccatatttgttgtgttcatttgactctctggggttggaaataacatttcatttttcccattttatttccagactatgatagtatgatttttgctttaacttctctttctgctcatgcattcaaaattcttcagagggacttgccgataggtatcctagggagccttctagcatgcgtcttattatatgttgctgtatgcttggtgattactggaatggtgccatatactttacttggtgaagatgctcctttggctgaggcttttgctgctaaggggctgaaatttgttactgtattgatcagcatcggagctgttgctggtcttactacaacacttcttgttggtttgtatgttcaggtataccttccaacttatctataagtgatccgtctttgctttaatcaaattgatcaactttctgaacattgccttctttgaaatcacagtcacgtttgtatcttggacttggaagggatggattgctaccttcaatatttgccaaagtacacccaacgcgtcatactcctctgcattctcagatctgggttggttgtgttgcagcagttttggctggtctctttaatgtgcatgaactctctcatattctctcagttggcacgctggtatgtaaacttcagttaatattcgctattacaagtttacaacacataactgtttgcttcttttttttttccttttttatgtgtgatgcagaccggttattcagttgtatcagcttgtgtaatcacacttcgatggaatgacaagaccaccagttgtcgctcccttggaaatatgtcaatctggcaggagggtgttctatgtcttgtcataattgctctttgtggtttcgtagcaggaatgtgctatcggtttagctatgccattgccttcatgataatagctcttctcatagctgttgctgctggttttgctctccagtttcgacaggtaagtaccttttatattagccagtagtactaattagtagatcctcgcatacctacctcgtgtcatctcagatgtgctccatagtctgtaccaagtgatccttattggagtgattacatggatcaccctcttttgtttttctgcttgcaaattgcaaccgtgcatgaatgtgttaataaactaaactgtacatatcgaatctactgttccaaggtattgtacagttgtttattcaaaatcttgcatggcatgcattttcaggtatatgtggatccacctggcttttcttgtcctggagttcctattgttccaatggtctctgttttcttcaatatgcttctctttgctcaggtttgcatgactcaacttcttggatatatctgcattttctttctttgaatttaaatatgaaaactttgtttgtaccctctgtcttggtgtcttggcttctgttgactgatgaatcttcctaagtcataactgatggcaatcattctacatctcgcagctgcatgaagaagcttggtatagatttgtcatccttagtctccttgctgtgggtgtctatgccggctatggtcagtaccacgcagttccttcaagttcagaccacccacacccggccgttgcttatcatggaattccttctgaagctccatgagctactgcaatttgcaagcctccggcttcatcccaaagttcatgtgcaatacatctgggtagcctggggcctattattttccccagctggaatattaaacctcgccttgtcaccatgcatactccatagttccacaccgtacactgtaaatcgccagtcttaaacgaagatattttagctggcatcataccaatataccattcaccatagatgccaaaaggacagacaagttgccctcctgtatctagaaagaaggaatctagcaaagtagtagcaattttttgtcacttctatgtgctgaaatgaaccttttgatatcacttcttatgggtgaaggatagatgattgcgttgctcatttttaaatatatgaatctcaccatatttttgtaggaactttacaatagtcagatcatttctgctacgaatatcgaactatgagaagttaaacttaggggttgtccagatcgatgtcatttcaaactatacccttttatggtaaaattgttaaagatgtacatacatttagttttctttttttaccaaactttggtaaatacataagcaatcatgccaaaacattaatattgaactatgagaatatataagggctgttcaggtttattttggcttcaatttgaaccgccactttacacggcattgtgtgcatagtatatcagatgctggattgctgggccgctgttgttctttgccaattttaagcttaccaaaaatttggattgccgaaaaaaaattgtcactcatttggtttgctaccacaaatttggcaatgccattttttatttcaacactagcctagcaggtcttaaaaaaaaattggtagtaatccaaacaaacatcttgccaaaattttggcaattgctaacctgccaaaagaatcaactaggcccgagtcatactgcaataagcgctactactactatactcccttttagttattcctaaatgatctacatatttgtgttcattcattaggtctattcgttatttgtacattagagtaaatggacattgatacatgcatccatgcacacaaacatttgtaacatatatgcaatatcttgatttgctattggctaggaaatagtggggatggtgcatgcattaagtttgttgctagagtaaatatagtatgagagttattagcttttcttgttattagtgtacctatgaaatatacagataaatttggaatggatggagtagttttttcttccgtctccacacgcttcacttaactactcatcaataattctgggacagcgataattgcagaattgcagtacgtactagactagttcgtgcagtgcaggtacacaattaagtcacttaactccggtacttgcttcccgatccaacttaacaccagtacatgagtactatctcgcggtgcagcaacaccggccaagagacagccacagcgcagcgaatcgtgaaggatggtagagtaggaggagcagcgcgtagcaatcaattcattccactgcacctttaccttcccgttcccgtcccgtccagcgcaacaagccgctcctaccacatgccccgctcacatgcgattgcacgaacgcatcatcatcgcactcgcgccacgtccggtggcgactggccgtggccacgcctgcacgcactgctgcaagtggttaaacctgccactctagcactccttccgcccccattttcacttaagctgtgtttaattcacactaaaattaaaaaattagttaaaattaaaacgatgtgatgaaaaagttgaaacctgaaagtttgtatgtaggaaaattttgatgtgataaaaaagttgaaagtttgaagaattattttggaactaagcacggcgctagtactcattgtgttccattttaagtattttaagtatatagttgtgatttctatgtccaacctttaatcgtctattttgtttatttttttatggtttatatttttattattattagatgataaagcatgaataatattttatacatgacttattttttttttaaaaaataagctttttaaataagtcaaacggtcaaacgttgatccacaactacacttaggggctgtttggttcttaactaacattgccataactcattttagaaaatgttagacaagtgtggcttgccacactttttgtggcctataaattgtaagccacacttgtggcaaagttaggcaaatgattgagtctatgacatgtggggtaggacggcaagaaagtgtggcttgccataactatggcaatgaaccaaacacaaggctaaggatgtgtggcagtctaaagtgtggtgtggcaagttaaagcattgaaccaaacagcctctaaaaattggacgtagggagtacaaattatactacaatgcagtagtacatactcctactagctactccattgagtagtagtagtactaacaagtttttttttttgcggggaagtagtactaacaagttgaagagattttgtggtagtgtgatacagatcgatcgtggctggctactcaagcaagcaaggagacaggcgtgtttcatggcaatcgttacagcacggagcccccggtgctcgacgacaagatctacgcattagagacgccggagaggacgggcggccggtgcgtcggcccatgggttggaagctagtatagctctggtggtggagtttggaggctgcgttgcctccgttttgcaccgggacaggtctccttcacgtgcactgccgcttttgcgccatgatggggtctcgtcccccctggcccgccgtgagtgagacgcaggggctacccggtaaaaaaggggaaaaaattgtaaccttcacaccaacccgactctttttctatttaacacacactcacctcaccaacctgattctgacacaaagtaaaggctatgttcgtcggtgaagaagatgtcgatcgaatctgtagtaggagcactagtagatgggagtagatcgtagtagagcaatacgccaatattaatacggaagttatactgcagcctgtacgcttgtacggctgtacccatcaccagtgcatcagaaaatgggagttgttggggattttcagaagctgtggatgtctgtattctggtatgctagctccgaaaaggaaaagtaatgatagcacatgtatcctttgtgtcggcgaaaggaacgggattgatttttgaggccactggggtggtgtggtgagcaattagaatcgctcatagttaaaccatggagtaagagcacccgcaatagtaaaataagatattctctataaaatatgtacatctcagcaatagactagattaatagtaaaccacctcaataatatgtctacatgggatctatagctctctaattcattgtctcatttttctctatagactatctccaggttagtaaatagctttgctttctcttttcatttaatctcttctaaatataaaaatatgctgacatggatcttttctaaagagcctatagatatccattgcggctgccctgagtgtgtatgactagacgccactaagccacaggctatcagaaacaacgaaccgtcgtgggttagttacaattgggagcagagagtgaattatttgtttactgataatgacaaatctccaaccttgcaaggaccagcattggggaaggagccaatggcaccactgaaaggaatcaccattcgtggttgtcagtatgtatagcacaaacgcacatgcaatgagaggtgtgggagcatcgtaatctctacagtaactttagtttcatggcgtctggatgaggaacattccagttcacatggagtgtttcgatgcattaaaagtacaacatatacatttcactaacagtgtgttatacagttcttcaggggcactggcctatgaacagcagttctacattttttttttcggttccaggtaatgcacaagaaaaacacagtgatcctgcatctgaagcacccctccagcatgtatgttactctgagttcatgtcaaggctattcagttccctggccagcacaaattcagcaggtttctagccttggccaggctgaaatgcctcagtactcgtcattgctgtatatgctgctataatgcaatgccgattaaatagcaagccggtaaactacccagtttaatttattttgcaatctcttcgagctttttgagtataaactttgtgttaggtctcaatgatggtgaagggctacagcaagctgttgccaactcgaagaaagcattcaaattcttttccttccctgacttcttgctctgcctgacaagatcggagctgaatgcatcagaaatcttcctctcaagaaccaaatttttgaacgagacaggcaataggatgtcgcgagggtttggcgtgttatcctttgctgattccttctgggcaagcatctcaagcagaactactcccaagctgtagatatcagtctctctagtggcatctctcatcttgatcagctcaggtgccttgtaaccctgtgctgctgaagtttcaagcatctcctgggcaccagcaggattcagcagaaggtagaggccaaagtctgatatcttgcactcgtaattagcatcgagcagaatgttgttcgtcttgatgttcccgtgaattatcggtttctccaaccctgtatgcaggtaatccagtcccttgacaatactgatagagagcttgcaaattatattccatctttgtgaatcaacaattccctctgttttcggtagcaacagaaaaacattgcatggttagcaactatcacaatgaatgccagaagatgcctaataacaactttattgacaaataatgttatccaaaattcagccatcaattaatatggtgaattttcatccacaagcccaacactacataataaactgacagtttaacttaatttattgaagatctaggttcaatgatcgaaaaagaaaaggaagatgaaatgcagtggtttgaaagtaagacattgctagtacaaaattctgggagttaacttgaaatatcaaatatgtaaatgtgtgctcttctcttcaatcaagaggcaacaatacttgtatctaaaggacctttctacaaaagcctgactgattaattgaacacgggaaacttgttatatcctaatgattatggtagttaagggttaattaatgacttcaacaaacataaggagtcaggaccatgtcaccagtacacagtgctatgtcatgtttcaagctaaacaagagttgacaaaatactttttgcaatcagcaattatagcaaggcatagattagaattaacaccataggtccatagctatgaggttccgagcatgactatcttctccattccacttggactcaaatcactcaaaattgagagtttgagaccaattgccctactggttttcttatgtcttcaaactctcttagaaacttcactatgccttttgcattacaacaaattcttgacagatctgttgcaggcttgcagcttacaggtataattcatatccagctatattctccatgctcatgtgagtttttaacattttaaaaacgctgttactaatttaaaacggaattcccctaaaaaattaaaatggagttgaactacctcttttacaacaaaaagttacattttttttaaaaaaaatcacgttgctaatttacactgcactttcacaatggtggataactagatacagaagatgagatacgtgcattgcagcctgcgtgcttttgatgctactctgcagtgcagagatgactactctaatatcgcagcattgccatcattgcctaacatttcggggtgtaagatctcttctcctaaaactctgaccttgatccccatactcgaatagtataatcagtcacagtaaattatacttcgaacattgaaaattttggaacgtaacaagattactacgcaaagaagagctaaaaactgcaaaaggatacgagagaacagataaaatgctccacatttgttaccaagaaactaacaacaaggcaagtaaaataagcagagatgcagaccaaccttgcaagaatcgccggagcgagccggcggcgtagaaggggtgcacgagcagcttctcccccctcggcccgacgtagaacgcgcggagcggcacgaggttcgggtggctgaccgcgccgatccggcgcgcggcggcggaggcctcgtcggaggtgagcgcgcacgcgggccgcacgaaccggagcagcacggcggcctccccggagcgcatcgcggcgcggtacagggtgctgtgcgacgacttggccaccacctcccccggcgcctcgaggatggcggcgacggagagcgcctccccgccggggaacttgacgagcgcgtccgccctgccgtacgcccctgcgccgacgccgccctgcgcgcccaccccgaggcggtcggcgatgggggccaggtacggctgcagcgcgccgaggcggtcggcgatcggcgcgaagtaggggagcatggtgttggccgtcctgctccggcggaggcacgccgggaggcgggacgtgaggcggtcgagccgcaggccgcggaggcgcggccggaggtaccggtacagcaggtagacgagaaggatcccgaggatggggagcaggatggagttgctcctccccttcgcctccggctcgtcccccggtggcgccgtcgccgccgtcgactccgccattgctcctatctcccagtactcctcctcctttctcctggataaaacggaagaagccaatggcggtgggtcaccttgccttgccttgccgtgcttgctccgcacagtttgcttgctcgctttttcccctcgggtggagggaagaggcagcggcgaggggagggtggcttgagattcttgtcgtctcgaggcttgtttctttatcactgtgggagtgagacgacgagtgtgtgtatgtgtgtgatggcttacagtccagcttcactctgttgattgccctggcctttttgccttttgcttttggaggttggggtcgcggagcaggtaggtagcccagtagtgcgcagtacgcgctgtggtggagtgtggacgtgacggcaaatcggtgattctgccccgttgaaattggcagcggcggttaggggcaggaacggcggcggggccgggaagtggaaggtatcctatttctatcgcgcctcgcggttggaccgggacggcggtggtggcggagacgagacacatcacacaacacatgcgggacgggaggggaggaagggagggaccggcaccaaccgtggttggctgctccgtgtggcccgtggttacggctgctttctgtttggccgtttcgacgaacactgcgagtgcgagcctaattaactgcggtcggattcagccttaagatccgtgctatctggcgtcgatccgacggtgttgattgatttcatctagtagcggacatatctatctaggagtgcagaaagaaaatttcccggtccgactagctttcgtgaggtgcaacacatcaaggcttctgttgttgtacagtcgtgttccttcatgaaggaaacaggtacaagctgatggccacggaagcgtcgtatttcgttgtgtccaacatagaaacctcctatcacatctcgcttttagcaactactatcaataataaaccttggtccagactctaaacaacaagtccctgtcaaactttcgttgtatttacatgaaaatccttcatcaagattcatttcgttgatgcctgcataccaacatcaataataaagtatattaagaattggtgtacttccagttctatagattgtttttttaacaagtttgtcatcatcatataaagctccaatagttgcgtaggatttctaatgtattttatacctttatattcatttcaaaattcgtgcattacctaacttctcctgttttttaatctctaagagcaactccaataaactatcacatagctagctcttcaactgacttggagagccaagcttgttgctctaacactctctctatttacacactctatttcgaatctataataccgggacacacatatcaacctctacttcctcattcttcttcctcctctttctccccttcttcttctcccgtggccatccttgagctcttccctcggcgacagcgatggcagaaccatgcgctcatgaggcgacgatggcggcggtgagaggggagaagacgatagtggctgatccgtgcaacgataagggatagcaatagttatggctacgacgacagatacggctacagtgatgagctcgacaagaggggtgaagccggcgacgagaggggaggaggtgcgaggagggctcagcggagcagccgcttgtcccttcttcacccgtaactcgagcggggggaggacggggaaggcggtgtgctgggcgggtgacctaagaggatgatgacggcgatgctgggtgagcggcactgggagtatgacaacgatgacgctaggcgggcagggagtgaacggcagacgtgatgggaaaaggaggagaaagagagagggggtgggacccatgtcgatggtaagttgtcttgccttgccaactttggccaatgtggagatgaatttagccagccggttggtaggtctattggagcttttttttatataagtttgctaaaatttggcttggagagccatttggccattcttttagagatggtctaacatgccatcgaattaggttaccgagttaggtgtcactattggcatcgccatcaatcccctctaaccctatctatatctatcactatctctactattataaaaatcgaagatatttttgcccaaaattttagtgcgtcgctctatttcgataagatgttggtgtgcaagcatgtgagatatctttgcctctatatctattataaaaattgataattttttggttcgtcacatcttttcttttgtccgtctttcatttccgactctattccctgttccgtgcgcgatgcgtgagatgagcgatggccaccatgcgaaatggtgccgcaacaaatgagcggatctgaaccggtatgcaacaagcgtgcaacctaggttaattctgattcccacgcttattcatcgtgtcatccctgtgatctcccgcacgtgccttaacaatcctactcgatcaaattctggagcacgtttgcggcaacgaatccaacgctgctccgactccaccaaaaatctctccgccatatatacatgctctcgatcgatcgatcacatctgtgaacagatagagatggctagcaataaggcgacggtaacgctccacggctgtgacagcacggggtgagcgtctaggcagagatgatgtcagcaacatcggttgatcaccgtgatcaggatagcgttgaaggtcaagtgtgccatgggccgcgatcgtgaccatgctcccgatgaagccatcgtctcagatgtcatcatcattcccgatgtcacagaccgctacatccttgtcatgtcgtcacgtttcttccggcggagcgatcagactgaagtatgggtgaagatgaaggtttgtgttttgccgttacggagtgggtgcattcttcatggttgccaggatggttgtgttggccctaaccaagcttaggccaaagaccgagtcagtcaactactccctcagattccataattcttagcattttgaaaaaggttgaggtctaacttttattactttgactatcaataattttaaaaatatgtagtttgaaggcattaaaacaacacatatagatttgtcttataaagtactatggtaaagtaaaaaagtatttattttattgtacatattataatacaaaagcgcaatcaaagatatattttgaaaaccgtatcattgttcaatacatcgagaattatggaaccgaagggagcagagctgcacaccacatagccttctacatgcaaagtgcagccactcctcagtcgacgaatagatagtagtacaaaaaattcaaaatgacaaatggtaatagctgaattcagaacatcgaaataatacttggatcatgaatattaaatcctaatcatcccatgtttaacgtaattttagttctttcccgttgcaacgcacatgtcttttagatataaattgaaacataaggggacaaaataaacatctaagggaccgatagatataaactgtatcaaaactgagcgtttatttgaaaaagaaaaagtttgatattttagagggggagggggaggggccttgagcccttgacccttttgctcctgtaagttttgtgtcagaatggtaagagaaagccgtacatgtacatacctagaaatggatgcatccgaagaacgttattttccgttcattaacacctccttttatccggctcctatcggcataaaatcaccaaaataaaatcaaaatagaaaaagagagaaaaaatgatacaagaaacatgacgttaccgatgaacagatcagctgttcacaagtacacccatgtcacgatcccccttcgtacgtaaaatggctcataatggttttactcactccacggtacggtgcatgactgcatgcatcacgtatgcatacttgccaagttgccatgaacgcctacaacctctgcaacctgatttgctccctgaacttggcgatgaactcgtcggccttcctgtccacctcgtcctccacctccgccgccagctcggagagctcatcaccgtcaccgttgtagtcgtcatggtcgacgtacgacctttgcggcgacgcggccatctcgtcctgcacgtcagccttctcgtcgtcgtcgtcgtcccagtcggtgacctcgccgtcgtcgctgaacgactggtcgcaacgaggcgccggagaaatgtagctcgggaagcccttcgacatggcggacggcgccgccgccgtcgcagtagcagcgggtttccgggacctgcagacggcgtcaagaacagagggcggcgaaggggcggcgccccagaatcccgccgtcgatgcggagctgtccgtctctgcgccaatgccgtcgtcgctggcatcgccggcttcggactctatccccggcatcgtcggcgccggtggcggcggcttcagcctccgcaccggcaaggaaagcggcctcccgctcgcgccgccgccgccgccgtcgtcactcgccgcattgtcggcgaccacgacgagggggtcgtcgctgaggtaccgagagttccacgccctggcgccatcatctccaccgccgccgccgccgcctccgccgctgccaccggtggaaatcttctgggcgaagacgccataggagacgacgaggccgaggaggaagaggtggggcacctcccacaccgcctgcgccagcgatggcagcagggagacggccccgacggcgacggcgagcagcacggccacgggcgcgagggccgaggagaactgcttgctgctgttcatcgcgttcttcgcgacgacatggatgccgccgccgccgccgccttgcgtactgggagaggacgacgccgcggcttcgacgacgtcgtcggccattgccagcttgcgcgcgcgcgcgggcagacgtacgcggagaaggcttgtgcgtgtcacggcgcgcggtgtacgttgctgggatgagatcgccgtgctttggatgcaaacctcgcggtagctgctactgtttggggataccttgctttgcgccgcggagaggcttggctgcaaagcaacggtgaatatcgagatgatgatgacgccgcggtttcaactttggaaggctgctctgctccgcgtgatcgctttggcataatcacgtccacacggtcacggcatggtaacagccctagcctagctcctatcctccaacgaactgaacgagaaatctccatagtacctgctactgccatctcaaaataagtacagtcgtgagaatccgtatacaaagtttgactagccatcttatttaaaaaatttatgagaaaattaaaataagttagtcacacataaaatattattcatgttttatcatctaataacattaaaaatattaatcgtaaaaaaatttcaaataaaacgaacggtcaaacgtgagacataaacagtgcaaaactacacttattttgaggcagagatagtagtaatgaatctaacaaagataaagattaagtggttgatacggaaaacatgaaaaccattaacacatgattaattaagttttcaattattataaacttagaaaatgaatttatgtgatattttaaaacaatttatgtgtagaaaatttagtacaaaatacaccatttagcattctgaaaaacatgttgggcagaaatagagaaaaaaatatgtatcttaatgtcttctttttgcacattttagcatgcgaggatgattgttttgcgcgaaaaacaaaagaaaatgttagtaggatgtcgtcttctttttgcgcattttggcatgagaggacgattgttttgtgcgaaaaacaaaagaaaaaggaacggtttgatttctcgagagaagcgaaaagggaaagatgcggttgacgaggggcatggggacgtctcggcgattcgtcggggctcaggaagttacacacttggccacaaaggcaccgacacccctcgatcacggctgtccgctttgtcttgctccgcgccggccgacatcatccaccatcagtggcgatcatttccctcaatgattctccggggctcgcagttgaaagatatctggccgatcatgctgctgatacgcacagagattacagaagatagcaatttgcctattcctagtttctacagtggatccatggattctgtacgatctacagttctacaccgctggtcataacagtgcaatgctctgtttatgtgttgtcataacagtgtaatgctctgtttatgtgtttcagtcgtctgtacttgggcagtcccggttgctcaatgcctcattgcctcaaccagtgaagactgaagagtagtgctctgtttccatccaaagcatgcattgcatctactacttgttaccggctggttcatagttcagactgatgagtagtatagtattcacttgtatttttaattaacaggacactggatcgctggctggtctcatgcttgctgccctgcctacccaatacccgtgtaaatccatccagctccagcagcatcagccgacacggatgctttgccggcgcacgggggttaaaattaggcacggtgcagctgtgcccagccccagtgggctaaatcgtcacagtgtgcagatccaccaaccattccgacgaagaatattattgccccagggtacgtcgcagtgtgcccagacatgttctgatcatatgttcgcttcactctacttccggatattggaatcactttttttttttttgaaacggagatattggaatcactttacagagcaagttctgctttattacacagcatgtcattgtttcagaccaaaactactcctgcacttagggggtgtttgggaacttagagactaaatttagtctttctcacaaaattataagtccctatggtagggacttatatttttgtgagagggactaaagtttagttccactttagtccctccaaccaaacaccaccttagtaaactacatgcctgctctttccggtggcaaaattgaagcgacccaggcttctgcattccgtaatctgggcgctgtgttttccattttctacagaaaaaatagcaacagagtatcgaacaggaacttctgtacagcatacaagtacaacacgccggggccttttgcaatcgtcccttcgggagaaaaaagagaagggaatagctacacctccggtcctgacgcaaagaggttgacaaggcctcggaaagcttgaacagatacctcacaggcctgaagaagttctccgtccaagttccagacactttcgtcatgtgacgatataaaagtaaatgcttgtgtctgcggaaatcggaagatcatgctcagatataataacatgaaggtaaaatgaagaaagaaaagaaaagaaaatgataccttatgatgttcgacaaacttgaagctcagaggatctgagcccttcttggtaaattgtgttagatgcctgcagataagtcagaactcataagaacatactctgcaaacagggatagtgaccaaatctagaaactaatttctgagtgaatttagcatgttctttagtttgtgaaaactacataaaagtggaaatatactagatttattttattttgtattcccatttctgttatgcctgtgcggccatgttcacttcagtgagtaaacatacatcaactatgaaaaggttcagagttccaactcgagcgcaaccagtctataaaaaatagctaaatagggatggtgggtcaatatataggtacccattgacccactttagttcaactgaatcaactaaaaatgaactcatctgactattagttcagctagcttgggtaaatggatatccatgtattgacctactcccttcctaaattaagaaaactttttaaacttgggataatacgcacaccggacctcttgtaacagatttctcaccataagtaaaagggaagagggcaatctctaatgagcagaagatgaagaaaaccatcagataggtgtgcgtcagctactagaccatcaggggctctttcgttacgacatgaaatgacagctgcaccaacactgagaaaacgacccttggaccagacccattttggggtctcacaagctgttctggaactgtctggattttcatcttctgaattctgttcagatgttgaagttcctttgcatattaaacaatttgttcggcagatggttttccgatgtctattttgatggtattgcagtgtttggactccatttgcattattctctgccgatgctgtaagtgaatgagtgtttccattttcaagaaaagccacttttgcctcataagatctgaaaaacaactagagactgttaatttcaaactgaataggtagataccagcacaaattcattgttaatcacctgtgcttcaaaaataccattgttccagagaagtcatatcgcgcaggacccatccacctgtacttttcactctcccttataacttctccataaaatccatatctgtaatcagatttaaaccacagggtttcagcagttatgcaaaagaggaatccgcagatggtcatatccaaaagactccattttttaatggatgacgctgttgacttttgaacacatgtttgagcattcgttttattcaaaaaatgtatgcaaatgtataagatataaaccatgtttaaagtaccttgagtgataaaacaactcacaacaaaataaattataattacgtaagtttttttttgaacaagacgaatggtcaaacacgtgacaaaaagtcaacggcgtcgtctattaaaaaacggacggaggtagtgtatgttcagtgcaatccatgactgcctgtgatgctaggaagaacacaagaaaataatatgtttccctaaaagatttaggttaaaaacataacaatctagcttgggttaactttttgaaagtgacttcaactgaagctctgaagttttctccagaactttaagcccttttatggactgatgttaacgttgacataggatgcctatgctggtactgcacaacgacacagccacatgtaagaaataggtaatcagaaatcaaatttgtggtagtattagctatatatcatgtctaagagacagtagcataccctgcaaacgaagcagcatagcgcacagttggtgaaacctcagctgatgggctacttttccatctgacaacttgagctatatcaagtgatatccttctgccgaggataataagcagagcagaagtcacaggatctcgctccccagttgtactgcaaacatcaacagggcttcaacaaccagaaaagaactgaaagtgatgatcaataatttgtatgcaacaatattgggcttatttttagtcatcacaagacagcaaatggttaatacaatgcatgtgctcctagtgttcaatggatttaaagcttaatagaagaaaacttcccaaggtgcatagtagtgttgaaggatcagcttgatattattttagcaggtttgtgggttattgcatgtttggcgttattgcacataaactgtcaggtatgattagaggatcataagttcataaaccagcttgcatgcaacggaacatagttacagttttttaagggatttgaatttccaatgttaagcaaacattgtaatcctagtaatacagatcagtaagaatagatataaaattgattactacctgagaacaatagcatccgttgagccagaaggaattattccaagcctaaaccaattatttgggaaggagactaaaggcacctgatctgcagtagcataaagtggaaatgaaacaggaactctatgtaagtcagtaaatcttaaaagtgtaacaattttaagataaagcaatagttaggatttcgcactgacctccattgcatggttcatcactagaatctacaaataagagacaagaaaattacttacaagagaaatttctctgtataatatgaggtagatgtaaattgtaaaatcaaagacatacctgatgacgagatgtccaatcctgtagatcgtgtggttgaaagaaggggctcatgatcatcaggtgtgttagaacttccagagatggcatttgcatcatctcctgtgagctcactattgcttagatcattatttctatgttcttgacacttcatgttgtttctgaaatatccaaacccttctggagttggaggataagaatttgtgtgccttgtacttagtagcccattcaaaatttcattaaataaaccatcaccaccctaaaatgtacagtttggagatcagggtagtaaaacgaggaggaacttcagtatgcttatgatttatgaacaagttgaaaagtggattgagaatgtgagtttttttttctctcaaagtgaaaagtgaaagttaggtttgtttctctagtggcaatcaatgcaaggtttatatagccatacaaaatttttggacatgtactaagtaatctccaattctccatgaaatttaaccaagaggtatattttgacaagcttgaagtgtttttcaaaatacataataaagcagtagaatatgagcatgctcttgtggccagatgcagctgattgtggatcataactaagcgtgttctctggcctagcactcatcttgtaattgtgatgcttaatatcaaacaatgatagacaagcatttattgtgttctaataaaaaaagggtaagcataagcatcatagcacttccctataactataaattattcaggaaaacagagaacattattttgaacgaataagtagaaaaaaaatcactcaagttcacataccactgcaataacaccatcaaatttcttgagatctttatctgataaagatgctaaagtatcatatgcatgtcctgctcgctgtgtgactatcacctgaagcaatgtgcatatgaggcgatcaggagttggagctttgagggttgttcaacaaaaaacttataatggtaatgtcacaagatcagaaaagaaaatcagtcatacacatcatatgctcatctttaactgttatagattttttatacttccactggcagaagtttaccttcgtttttacttttgcccgctcaaataatggagctactgtttcccaattcttacaccctctaccttttccacacaatggatggacaaatacctacaacatgaaaattagttgatgcaagaatataagaccaacgttgagcagcactgacatgtttgtcaaaatgctatgtcaaggagcagaaaagcacatcatatttaccatgaggctcttgggcctatcctgttccttatttatgcacgtctttatatgctccacccaagttttgcaggtttgctggtctttatgaccaaaaatatattcacaaggtacccatggagatggtctttttcttggtcttgtgaccgtgtgtatgacaaatcggttcatctgcatgagcaacagttttttgtcaattatttgtaaaaggtgtcatctggaagagcttatataatgcattatttaatatggcacgaacgctttgacacatattacagaaaattaagtctgcaaagtaactagaagggatgttatacctcagtatttatcttgccttgaacggtagctcttgcattccaaggttcacatacaggacccacctcaagaagctctacagcatagacatctgaaaacttaagcttgctctctaacttaggttgcattatgatagatgaccaacatgaagaactcacttcctgcaatgtacagaagcacaatgagcagaaaacacacaggtgcatgtcaaaagcaaactgatagcttctatgagtacttgtatgatttgcagatggataatgtaagtctgacggaatagtaaaattgcactatccttgctgataggaactaaatgcatgtcaaaaatgtcatattcaccaactatgtctttccacacgagctggaagtctggagctctttattgaatatttcaaccaaggttcaagctgtgttttgtgaaatgatagcttcacaaacacactactagtgttcctgtttctagtttgagtaagaatattatcccttttaaaaaagcatgcttatgctggtcacagacgcaatcacacatctatacaccgtcatcaacacaagctacttatgttccaaacagaaacttcaatatcgccatgttggccaagatagcgatcctctcctgagcttttcattaaccactgattttcatgaatctcctgaaaattgttggtataaatagtgaaccaactagcctatgttcagaattctaataggtacagtacaaggttgtagattcactatttcagacaccagcgcattattcatcgtctacgcctctctatctaccttccgtttcttcgattcaagaacccgaagaccggaagctacgaatttcctgactccatcctacaattcaaccaagactcctgtcaaaaccccagttaagtctgtaggatctaaagactagattcggggtgagcgcagacgggcagaagggcagcggcgggtgcggctgtgcgtaaacctggtgaaggggctggaaggagaggccgtcgtcgccgacggccaccgtgacctccccgacgccgtccaggaagagcgcctcgccgccgccttccatggcctttcccgcttgctgttgcttggtctcacgactcctccccggtcacccgcggtgggggaagaggaggggcaaatgcgaattcttcctctgtttttttttcctttttcagttgggtctgtgcgcgcttgggtccgtggtggctgctttcgcgtgttcgctggctggacgtttttgaccaacggcgccttttcttgtcagtccttgtgcttgtacagttcaataactttgccaacaaattatccgtagcaaacgactattcttactgtttttacttctcttaaagtttataaaatatggagaggtcaaaaaaaaaatatagtggtttgaaattacaagagagtgccatctcacaatcacttataactttagagcaagaataatagtttcgtcgacaaccgagtacataacatctaactcatctgcacaaggagctttatagcaaagatcatatgcaatagcaggttgttaaattagcaaactgctaaaacttttgcgtagatttagcatggctagtcgcacatgtcccacaaaaccacgtgagtttccgtcagcatgggctgcaagtgggttacgatctcttttttccggtgctaccacctagcgataaatcaactgctcgtatttctctctcttcttctctcaatcttctacctagaattgaggtaatgtggatcaatttatcacccgctgactcatctttattgtatctgctattaaacttctcgaatgaaattggataaaattctggatactcgtggcacgtttttaaaccgctaaacggtgcgtttcgtgaaaaaaaaattcctatatgaaagtggttctaaaacgtcaaattaatttgtttttcaagtttgtaataattaaaacttaattaatcatacattaataccaccttattttacgtaaaacacttaatctttatcttcaggagaaaataacaccacccgagggcatgcctttacattttcagcagcacttaaaacaaaatataccatcgatgcaaccattatatatttaaaaataaatctatttgattttatatggtttgaggagaaatagttgattcggtaagcctattgcataattgcacaaacgacgacgagcagcagcagcagcagcaccaccaccaccgcttcgtccgccccgtgccccaacggccgacgctgctgcacggcacggcccccggccgaatctgccgtgcgcgggttggcacagtggcacacgcccaaattccatccctcccgtccctagccggttcctctccttcctccccccctcgcaaaaattcaaaaaaaagcttgcgctcctcccgtcctccggcgccgatctgctcgaaggaggccacccccaacctccccgaccaaaccaatggcttcctccaacgaaacctaccgcgtcgagctccgagccgccgcccgccagctcggcgagcgcggcctctactccgccgccaaatggtacgtacgccccccttcccctaaaacccaccagggcccccctcctctaaaccctaaccctaaccctaaccgccgccgcctcttccttcctttgtagggcggccgagctgctcgtcggaatcgagcccgacgcgacgccggccccgtcgtcggtgatggacaccccttcctcgtcgggctccgccgcatccgggggccgcctcctgcacctccaccgcagcggcgggtccagcttccgccgccgcctccgcccgggcgcggccgaggccgggacgccgctcggcggcgtctcgtacgtcagcacgcccatccccgacgacgacgcgttcgacgtggggggtgataggtacctgctcgccaagacctacttcgactgccgcgagtaccgccgcgccgcgcacgtcctgcgcggccagaccggccgcaaggccgtgttccttcggtgctatgccctgtacacggtgagttcggatcctattgtttttttttaattattattttggtgtgcgcgggcgtgttccagtttgcagatgtttggtatagcgagtggtgtttgtctgcttgaggaaatgtctctctggagctgctgcaaatatttacggctgcaattcgcttatagagttattcatatttttcaacctgtagaaacatctgattagttatcttgacgtgtcaatggagtaacagtagtgggatcttactgaaggaaacaacaggaatacattaaaattgttgtaaaaacgtaaaaatatttttatttggtatgttctcctttgttcatggtttgggcgctaaatctttgaagccctaggagcgccgatactaggatttacttgtcttaatttccccccatgtcatggtataatgatgtactgatttatgtcagtttaaaccttagtaatttggtaaatgtctgaacatattgaaaaatgctgaaccctttattttacataactgttgcttatttgcttcgttcctggttgtttggtgtccttaattatgcattacagggatgcttgattatttttattgtaagcaggggatgctggtttgctgcaatgttaacattagacgaatttattgcatgcaggaatgcattttactaatacagtggttctgttgtaatgaagtttggaaacattatattctaatattgagatgtatgggcagtataagatgttaacttatagtagtaacatgattgcctgatgcaacaaggagggctgaggatccaggtccataaatgatttatcttttcctctttgctatttaatttgtgatctgctaaaataggagtataggacacgccatagtaatacagtatataactgtacgcttgaggctatgttgcttttgattgctagtgtgccactagtgaatagtgactagtattgaagtattcaatttagaaccgtgctgatttccattttagcaggtctttctattacctggatttttatttaagttggtaagcttcactgtcaatatatacagttattgtcaatctttgcatcaatgtatgtctatatacactaacttattagatcgtacaaatgtggctagcagtcttcttatccatggaaggattctattaaatgatttatcttttcctctacaggttatctaatcttctaaatactagaaactgtctcccatttgcttcatagtttaattagcattttgaaatttgacatgcttggtgatcatagttcttttctctacaatttaggctggagagaaacggaaagaggaagaaacagtcgagcttgagggatctctgggcaaaagcaatgctgttaatcaggaactagttgcattggagagagagctcgcaacacatcggagaactggtgctattgattcattttgtttgtacttgtatggcattgttctacgtgataaaggcagtgaagctctagctagaacagttctggtggaatctgtcaacagctacccttggaactggagtgcttggttagagttacaatctctctgcactagcagtgacattttgaacaacttaaatatcaagaatcactggatgaaagatttcttccttgctagtgcacatctcgaattaaaaatgcatgaagaagctttgaaaagatatgagcgcttaatgggggttttccgttgcagtgactacattcaggctcaaatagctaccgtgcagtatagtatgagagacctggatgaagctgacatgatttttgaagaactccttaggactgatcctttccgtgtggattctatggacgtttactcaaatttattgtatgcaaaagaaagctcgactgctttgagtttccttgctcacagagtatttttgacagataaatatcgcccagaatcttgctgcataattgcaaattactacagtttgaaggggcagcatgaaaaatcagttctgtactttcaaagagcgctgaagcttaatcgaaagtatctttcagcttggactcttatgggacatgagtttgttgagctaaaaaatacacctgctgcgattgatgcctacaggagagctgttgatataaatcccagagattaccgtgcttggtatggtcttggtcagatctatgagatgatgggaatgccgttttatgcagtttattacttccgtaagtcatcatacctacaacctaatgatgcccggctttggaatgctatggctcagtgctatgaaagtgatcaactccagatgattgaagaagccatcaagtgctatgagagatctgcaaataataatgacaccgaaggaatagcacttcatcagctagcaaagttacatggtatgcttggacaatcagaggaggcagcattttactacaagaaggatctagagagaatggaagttgaggaaaggcagggccagaattttgttgaagctctgcttttccttgctaagcattgcaagagcataggcaggtttgaggaggcagagcactattgcacaaggctcttggattacaccggtccggtaagttcaattttacacaaaattccttttacttactgatgaaaataacaaaagatggaatggagcaaatagacttcttcttatttattggctttgttaatgaacacttatgtttgcgtactaatgtagttcaaatagacttcaactcatccagtaagcattcactttgatttgttcttttagggtgcctgatttctttactctgggtctaagagtgggaactggaaaatcatgtttttcattcataaataatcaatctttgtttgatctcttctttctgatgattctgattcactaccacccgtatgttctatatttacaggaaagggagactgcaaaaagtattttgcaagggctaaaaagagcacaatcggtacttccgttgatggatatcgaccattttgcaatgtaaatttgacttgcagataagttatttagttggaaactaaggtgttaagtgagatgtacaagagaaaactaccccttgcgtattcttttctccatttttgcatgcatcgaggaaagctacacattggtttcaagagaactgctataatacagaacagtcatcatgaacaaaggggattggttatcactcacaccgcaccaggcaaggaaaagaaatctatctaaggccacacactgacccacctgatgaaactggtactttgcgtatctccagtaccagtagagcagccacttccgagcttcataatgtaatccttattgtttgtatccttgccagaaaactccatattgctggagatgttgaccttgtgtgcatgatgatctcttccagttgctgaagcttggtaattagtaacactaatcgccggcatggggcaaaaatgagcgtcatcgggatgatgaagatcgctagctcaagtatcggcattgctgcttgctttctgctaggttctgtttctatggcttttcttcactagattgctttggtctgtgttgcactcaaagttccatggagttgcttgcatatataagcttcttggaagacttgccttgtctggattccagttctcatattcttgcttgttaaaataattgttgatgctttcctttccaataattccagttttgtcaattttttattctgtctcgcacctatcatgcatgtttcctgtgtaaggatcattattgattgcgttgccccactcgatgtaacaccactggaatcgtggaatcggtgggattaaagtatcttgcaattacgcatatcactatattcatctgttcgatctattaacgtgtaaagtcctttatacgttcctttcttttttaagtatgtcttcctgcttactccactttataagcactttccggtttaacaatacacagtttagttagaaatgatcctgccatcaggatttgtttgctgaagctggagagttcacactaaaacatttattcttttttgttggctgggaagttcacactaaaacttaacattggcatgccattcggtttggggctgcacggggcaatatcagcgtgcagttttgcattgtgctccccaagcctccaaatgatacggacaactagcacatcatcaccacatcaacacgaccgactgcccaacaacaacggcaactactggcagccaaaaccgcaaatatacacacacattttaccacacaagcacgaactgaaatggaactatcatctcaccgattgtgttcacatctgccagcgtccaaacgtagcatcattgttacgagtcgacgttggctgcttaacgagctactatttttttcgtctcttttcaaaggctcccccattcctgggcctggacagctggaccagtttcaacagtgaacacccatcatcaatccatcatcggcgagtgattggagagaagggcgaagagagaaacggagaggcactttgggatagttcaatgtacaaaacagcaccattatttggtcttttttggcattaagttggttcattaaagtccaagctgttgcattaacggtgatagttttgtctcagttattgtacccccatgggtacacatatcttttgcttctgtttaagtactacctcgcccaaatacagcttcaccattgcatgacgccaggagtttacatagccaaggcaataatgactaatgagcaaatcattcatacgtcgatgtgacttgttcccgttaagaagcacactgcccgccattgacaaacaaagctccagcgtaacaaggaaaacaaaaggctcttaaccgatcggaactttcgatatcgctgcgccattttggatttttggccatcttggctcatgtttgcgtttcaagaaagccctttcacggtacagctagacagcgacacaagcaggcatcaatgcatcgtgtattcgtgtatcgtcgtctcttctggtacagaggacttactatagcctgtatgacaaataggagctcgtcttctcgtatggaggagtactacgtgtgtggctgccttggctagctggtgtatgatgttgtaccttgcactcaacaattagggggtgttttagatccaggggtgtaaagttttgacttatcacatcgggtattatatagagtgtcgcatggggtgttcgggcactaataaaaaactaattacagaatctgtcagtaaaccgcgagacgaatttattaaggctaattaatccatcattagcaaatgtttattgtagcacaatattgtcaaatcatggagcaattaggcttaaaagattcatctcgtaaattagtcgtaatctgggcaattagttatttttagcctatatttaatactccatacaggtgttcaaccgtttgatgtaacagggtgtaaatttttgggatgggatctaaacagggccttaatctggttctagttcctcctatgtttttactttctctgctcgtcgcttggccccaagctctatggtcaacctctcgattgactgagacaaatatgtgactgaggggctattcagattgacgctatttctaaccatacaatttttcggtaaagttgtcaaaaatatgcctacatttagttttttaaattaaactttggtaaatacataagaaattttgccaaaattttggtaatattgccaacttaccaaatcccaacttgccaaaatttgataagatttattttgtctacaatttgaacagcctgtgagtctttggttcactttcccaaatcccaactcacatgtctcgttttttgtgcacacacttttcttctactgaatgatgcattttttcaaaaaattctatacgaaagttatttttaaaaatcatgttaattaatttttcaagttttttttagctaatacttaattaatcaggtgctaatgggtaacattattttctgtacgggcttaactccacctcccgaatgcagcctaaggatgattaaaaatgagagaaaaagaccgatgctctctaaaagcgaggggtgggaccaatcctctcactaagcgaggggtgggaccagggttttactaggagggtgttcttcaaaggtaaggtaaggtgaaaattaaatgatacgtggttgggtgagataattaggttgcctctagtctatgttaaaactaaccctgtcatatttttggaaaaccgaaatttggcaaagttttgtaccaataccaaaatttgataagataaaggtacgtagatgttgtttggtttgatttcttgccaaatattcttgtgtggagttatgtcactaagtttaaagaaatttatccaattagtaaggtatgctagagtgcttgggatatatctagtttgctatcttattagaatttgacaatgctaaaatctggcagggtatccataatgtgatgaaatagtgggtaataagcattgaatgcatccatgttaccaggtaatatacattgtggaggcggtaaactactactatcagggtataagcttactataaagtattaacactttatggtgggtcccatctattttttttaattatggcatgactcatgtttgaagtttttttagatgggtctcaccttattatccactctacacatatatacattgtggtgcatatccaacctactactaccagcagggttcacaattccgacgaaaaccagtcgaattccgcaaaattttaagatttcaacgaggcttgaaagtagaagccgtctgagatttcgatgagtttcatctaaattcaaatttgaattgataaaaaaggaaaaaatcaaataaaatattataaatagtatgatattcatataacctattgggatataaattttcaaaaaagtattctgtgtatttattgaaatttgcagtaggaaagaaaagaataacgaattaaaaaaaagaaaaaagactgtagttaccgattgaaatttcgataatttcgtcaaagccgattggttttcgcgagcttatcggtaaacttaaggaatttgtatttaaattttggtttatgaaatttgttcggaatctaccggctttccaccggatttcgcgaaaaccatcgttccgccatagcccaaaacggaagaccatctcggaattgtaaactatgactaccagtctaccacctgacacgcgtccactcttatactaactagttttgcaataaacattgggtgcccgtatagctgaaaacggaattaaactgaacatgcccgtagtactgtaagattctttgtgaacggagtctctgttggcgaccagacgagaggactcggaatacaaatgggccgaataatttcgagccatggtcgaaatgatcaggcccactggaccggagccccgtaccatgccggtgaagagcccatcgaacgacccacctacgtacgccgcgtggtcctacgccgaccgacttaaagaaaagttcaataaagacgccctgcaacccacagggacgaggcctctctctctccctcgccgcgccgccgccgaacacaccccccccaccccccctccccacacgcctccgcctcctcgcaccgaaccgcctcggcgcgagcgcgagggagagagctcctcttctcctccacggcggctgcgcggcgtcgtcccgctccaccgggccgtcgtctggatctgatctaggagcggtcgcttcttcctcttccggtgaggaagccagcctttgccctagctatgtagctcgtgttttcgttgggtttcctgtgcttttttttttttaatttgtggccgcaaacggtgggatccatccagatctgtgatgtttgttcgtggagagtggtctcggttgatcccgtctgatacgggttgttttgatctgtagttgtttattaccctgagttaatactagcaataacaacttgttaatttggcgattgggatgaaccctaatggttctcgctgagtccgcccctatgtagtattgcaatatgtatatcattcgagctctattagaagattggttcttcttattgcaagaattgtgtggtatattttttctttgtttgcaggatattagtttgtactaatgctactcattgtagttattgcttcatgatttgttgatctgattccaagttttacgtttgtaggaagccctttttatcagtcatgtacggacgcatgccaaagaagagtaacaataccaagtattatgaggtgcttggtgtatctaagacagcaacccaggatgagctgaagaaagcgtaccgtaaagctgccattaaaaaccaccctgataagggtggagaccctgagaaggtctggggacaaacagttctatatttgtctactcttgaactgttggtttggtttggttgacgttttactttttatggcttggtcagtttaaagaattggctcaagcttacgaggttcttaatgatcctgaaaagagggaaatctatgaccaatatggcgaggatgcactcaaagaaggaatgggaggaggcagcagcagtgatttccatagtcccttcgatttatttgagcaaatttttcagaatcgtggtggctttgggggtaataaaattatgaaaaatgctttactttgatcctttatccttctatattttagaatgaaatatgcacctatttactgttttgtggttgaaagtaggtagaggacacagacaaaagcgtggcgaagatgtggtacatactatgaaggtttctttagaagacctgtataatggtactaccaaaaaactgtctttgtcacggaatgctctgtgcacaaagtgcaaggggtaagtatcttgcacattctcgagtggttctttcatactgaaaggattgttatttgttattgtcttgaattatgaatatatacaatttataataataataactattgactgcacaatttataatattaataactatattaactgcccatgataacttggggggtttactttctttatctctaaacttaagtttgtcttcaaattattttctggatcatttgagtgttaaaaagtccctctgaatcttatttctatataacatttatttctgttttgtttatttttatcacatagtgaagcacttttgattaaatacgtgtagctggtaatgaactacgaacttaattggttcatttgcacaaatgctatgtttaatctatgggaagatgcaatgtagtttacgacttgaaaaagtctgtggctgtatctgcaacagggctaacagtaactgcgtaacttgtctatctgttttttgtgttataggcatttaacatgattttttttccgaaagtaaaaaaatgaaaaatattaagaagcaacatagtatatcaaattaatagtgaatacatgggcacccaagttaaacaaggaaggaagtgagcctagctcacttggatttgagctgaatatatacatatgtggtagatgttaagacttgtttttgtccagctatgctgctgtcagaagctgttctgccggttctgacttctgagttttgatggatgtgttttaagagaaatatgcatggatttggtcctcgtataagcgcacttcacacacaagtaatattttgtagtacagcaggctcaaacaagtaattattgtcatgtaacacaacacttgctacccacttcccctcttaaattcaaggtgaaaaaactattgttgttctgaaagtgggggtgaaactctagtaacctagatgacgatctgtgcaaatgtacactaaggccttctcttttctgaacaacaaaaccagtttatctttttttgtattattactacatctgtttctgtacttggctacttgctgtatgtaagagtcatactgctacctctgcatagcatctccgaattaggttacagggttggattttgccccaaccatgcagatgtccatttattgcccgaacgttcagctgaatttgatggttctctacaaatgaaacttgcagttttgactcttgtacttgtagtgctcaattgttactcagtttaatgcattcttttttttttctagttttgttatattggtctcactgttgccttacgtttttgtaccttcagtaaaggatccaagagtggggcagcagcaacttgccatggttgtcatggtgcaggaatgagaacaataacaagacaaattgggcttggcatgatccaacagatgaacactgtttgccctgaatgcagaggatcaggtatgccattgttgtatcttcattagaagacatcttctggttgagtttgcctaatgattaatttgtccaggtgagatgataagtgacaaggataaatgcccgagttgtaagggaaacaaagtagtccagcagaagaaggtcttggaggttcatgttgagaagggaatgcaacatggccaaaagattgtattccagggtgaagctgatgaagctgtgagtcttatttacataagtatcaggccgtcatgtgcgaaatgtggcaactcgcatcttgatgtgtgtgttcataatatgttggagctcccatctaacattgcaaattcatgcttttgcagcctgatacagtgacaggagacatagtttttgtcttgcaacttaaagaccacccaaaatttaagaggaagtttgatgacctctttactgagcacacaatctccctgaccgaggctctgtgtggcttccagtttgttctaacccatcttgatggtcggcaactcctaatcaaatctaatccaggggaggttataaaacctggtatgctttcctcttttgactcttttacccattgctgtctgcctttatagtttcttgttggacatgttgatagatgattttcttggataggtcaacacaaggccatcaatgatgaaggcatgccccagcatggccgccctttcatgaaaggtcgtctttttgttgaattcaacgtggagtttcctgagcctggtgcactcactcctggccaatgccgatcgcttgagaagattttgccaccacgacccaggaatcaattgtcagacatggagctagatcaatgtgaggagaccaccatgcatgatgtcaacatagaagaggagatgaggcgcaggcagcagcacaggcggcaggaagcatatgatgaagacgacgacgaggatgctggagctggaccaagggtacagtgtgcccagcagtaagaacaattcgatgccattcggactagacgatttagcgtctcttatcatccaaagaccgcggtagctactgagttcattctattcttttttttaatgtacccccacctaaagtagctgatgcatgttatgatttctcttttgtgggaaatgttatgctaccatttttgttgtcttaagattaaggagcttgctattagtcataatgatgttgcggcctcactacaattattacagcctgccgtattatataccaaaatgagctaatcctcgacaataattcttacagacagcggaccgaatcagttgtattatactattatgcctgtggttctgtatggggatgcaaccacgcaatgcctgtgtcatgaataccctgaatccatgatggtatggtagtcaaatgttgcatgcttaaactcgtttctggtccaagtggtatgatctgatctgcgatgcatttgctctgcctactgggccaatttattttatgcttgctcttgttcagcatgcgaggaacaacagtgcgaggcttgggttggacgttgaaactgatgcaccactggtggccactggccagctccacttgttcaagaagatcctaacttctgaatcttctgaaaatctgaaccgatatgtccaccattgccgtcgtctgcactgcagatcgttcggttgcaccagcaggaaacagtactggatcctgcagggaaggttaaaacaaagccgtcgacctatgatttcattgaacgagtctctgtctcgcactgtattaacatctatttaaacagctagtggttgagatgtaacttttgtatgggcaacgtatgccactctaagctcgctaggccggatttccaaatttaaaaacaacattggccggtcctgccaagatggtgatcatagggggtgtttagatggggctaaaactttttaacccatgtcacatcggatgtttggacgctaatttggagtattaaacataaactaataaaaaactaatttcataaatgagagctaatcagcgagacgaattttttaagcctaattaatctataattataaaaagcttactgtagcatcacattgtcaaaatcatgacataattagactcaaaagattcgtctcgtgaattagtccaaggatatggaatgtgttttgtaattattgtatgtttaatactccaaattagtatccaaacatccaatgtgacatggacttagaataagtccctggaaaccaaactggcccatagcctgataggttcttatacaattgaagtacagaatgagtagttgtacagattgcgactgttaacctttggttagccagtacatgacatccacttgttcttgcagaatttctagcccagccattacatgacgtccacttgtttttgcagaatttctcacatgtattttttaattcaggagcttattatttattaaaaaaatattcaggagcttaatttttctctcaaaaaaatattcaggagcttaactattcttggctggtagtggcagcacagtctcacaaggcgctctgctatttatacctggaaggaagcgcatctccttcctgcggtattctgtgtgcctctctctctctctctctcctccaccttgtcgtagagaggaggcggccatggaagctgccgcgatccatgcgcccaccaccaccacctcctccgactccggctcgtgcgtcaccaatggcacgcgagagaagcgcgagatctctaagcacaagcagctcaagcggaagaggagcacctctcctgctcctcctcccggctgcggcggcggccaaggacaggaagcggcggtggagactgacgctgacgctggcgccgccggcgaggaggagagcagcagctgcggtggcgctggcgccggcgagggcgagcgcaagaggggtgacgccggcaggcacccgtcgtaccgcggcgtgaggcggcggagctggggcaagtgggtgtcggagatccgcgagccgcgcaagaagtcgcgcatctggctcggcaccttcccgacggcggagatggccgcgcgcgcgcacgacgtggccgcgctcgccatcaagggccgcgccgcgcacctcaacttcccgagcctcgcccacacgctcccgcgcccggcctccacctcaccctccgacatccaggccgccgccgccctcgccgcagctgcagccgccaccgaccaatgcgagtcctcctcctctgccgtcgccgccgccaccgccaccgacgccgaggcggcggagtccacctcgtcggccgcggccagcccgtgcgccgccaccagcagcgtcgaggagaacgcgctgttcgacctgcccgaccttctcctcgacctgagcgacgggctctggtgctcacccgtctggacgacagcgccggccgatcagtacgacgccggcgacgacggcgacgacgccgcggcgccgctcctgtgggccgagcagtgctggatggacgccccagcggcgcccgtgcagcctgactaattaagccaatccacctgctccgactcgccggccggccattgcaccggttgggttggtcgcagcagtcaacctatcgacaccatgggcgtctttttcttttctctctgtttttttttcttttttggaggtgccttgcttcgtgtgcagtgaaacggcgccacgccgcgtttgcggtgggcgatcaggcgatgtgatttaattaattacggaggggaagtcgttttagcgcgaggtgaaacagcggattgcatcgatcggcggcaagaactgcctagacatttcattgatcaaattactaattactccccttcgtggttgtgtgtaaatcaattcggcaaacattttgggagagcctcgtgtaatttcgtctttttcttcttcttcttttttatttttacagtagtagcgtgcattgtaaattttagagatgtgctatatatgcctatggcctaaaaagtattcagagacgtgctatataaacgattttgcttcagataactcgaacgttcagtcatatttcttctcttttgtgtacgtatatatctagcaaaaactgagatactttgtgttgcgatttttttttgttttctttatgtacgcgtcaacatcatgtcatcatcctactttacaaaagtaaattagctctagttccaggagggatattacttaagcggccgggaatattgtttattgtctaattaattactctataatctcctaagttcgatagaatttttttttaaaaaacgcaacaatgcaagcagtgtagagtaattaaacttgatgagaggtgaagataatgcaagtaacgagattccaaaaagtaaaaaaaaatgggcccggtatgtaaggtacaggcctgctacacacggtaatagaatattacacttacagtactattacaatctaagggttccatttatcaataaaaatagatggtcagatgggacgagtaattaagaaataagacctcatcagtcatcagaaaaaaaaaggggcacgtacagggtgacgccactatcatgtacgcagagctgcccattttcattttttccgaaatatactacaaacgcaacgctcatatacgcgcacgcacgcatcactcaatgtgtattaagagtatggctaatgtttaggctgtggttagatctaggggtgaaaagttttagcgtgttacatcggatatacggacacacctttaaagtattagacgtagactaataacaaaacaaattacaaaatccacctgtaaattacgagacaaatttattaagcctaattaatccgtcatagcaaatgtttattgtaacaccacattgtcaaatcatggactaattaggcttaaaaaattcgtctcgcaacttacacataaactatgtaattagttatttttttctatatttaatactctatacatgtatttaaacgttcgagatgacagggtgaaaatttttgccatgggatctaaataggcccttaatccacaggaaggccccgcggtaaggatggcaccctttaaaaattcatggaatgcataagagtagtaaaggttgacccaccaaggtggtgtttgaatcttctaaaaatgaagatgaagattaagtatttcacgcaaaacgagatggtaataacgtgtaattaattatgttttaattattacaacttgaaaaataaattaatcttatattttagaacaatttcggcatgaaacgcaccttttagcaatttgaaaaacgtgccacgagtatccaaaatttcatccagtcttttcatcagaaacgaacgggacctaagaatgataataggttcaaggttgatgtaaaggcatatgacaggtggacccatatattctctctactttagagatgggcactatatttgatgcccgtttctatgttagtaatggtaagaacaaatctcacaatgtataaggttggtcctatttttttcctctctcctatataacccctccaaatatcacgcagatgctctaatagcctattcatataagcacctctgaaaaactagctgtatatcttaaaactgatagtcaccacatatgtcttgtcgaccataggtatatcacagatcactaaatgaataaatgaccgttaatacacacatatatgtgaactctaaaatttgaaccattctacttaaaaaagtaaccaattatgtgctcagtttgccgagctacccaacttttcctctccagaacacgaaggtgttttatccatggtctaagcctgtaaagaataattaagttggtatatacggagttgttttctataccaagtgcatttgcacactcctttgtttttttcttctcaaataataattattaaatacttataacaattctaagaattttaagatcatcgtcatatattaggcatctacaccattttacaaattttgaagtacaaattcaatctaaaaaaggaaaaacataaacaaactggttataaataatattgaaaatattcataccccaaatttgtgtttttctttgtcagatgtatatatagattaagaattttcatggagtgccgtatagtattacaatttatgttaatataatgtatttttaaataaatttgttatgtactataagctgtaagaggtgagtctatgcatgtacactgaagttacaaattaaatagactgtttcacgcaatgtgggcagtcaacaccactttttatcatttttcgtttccaaacaaatcttggttcacactcatgtgttgtgtgttacctctgtttttttatggagtgttatctgacctgatttaaaattactcataaatttcaatcacttttacggttcagatctgtcaaaatgttgcaactatagtcaatgaaaacatcatttcttcgctccggccattcccacgattgctagctactcaagtcgctacactcgcacacattgtcgactccacaccttgcatgttgcaagcttgcctcaccggtgccaagcgaggtccgctgaattagcctctccatgcactattcacttcctctaagccttagtggcaacaaggtgcactcgccttttcgctcttcgtcgtcttgtaaccactcccaactacaatatcacacccctgccgccaactctgcttatcgccctcgtccagccctatggctctgatgatagcgtcactactttgtctctcgtctatttccgcctctcagctagctagtctatccagataaacctcttcttcgtcccctcaagcccccatccccattctgatcccaagacaccaccgcctttgacgttggcgttgaagaagaagctgctgtcaagaagggcaaatcttcaagttcatccaatgtcactagatgggttgaaaattttcgagttttcaggcatctaaaatatagcaaatccctttcgctttccttttccatttcctctttctacaacaaaccgcgtattattttggatcgaaaaacgctggcttgtttatgtccaattggtggtctaatgttggttttggtgacctccaaggtcacaattttacctacatgaatatagaagattgatcccggaatctttccgctatagtcggattaattatgcggccgattaataattgtttgacgaagttaatcatagcagagtactactgcctctatacaactcgatcgcgatgttttagccagcatcaccgctgaatatgccatgttcttcacaacaggacacatggcgtatttgcccccatattactatgtcacggcgatgagcctgcaggctgcaggacatgcaaatcagtaccagccgttcatgcatgtcacagtatctgtataatcaccggcgatgtaatgatcaaacatttgacgttttttaatgcgtttagctgtacgaagttgacatgccacggccactttttgatcggcatcaacacgcacacgggaacagcgtacgctaaacagcgtgtgatcagaaaaacggccagggttgataattaagtcatcatcagaggatccaatgctccgtgatcgcccgggcccacccgcaggggccgaggtcgacgatccccgggcccacctgtcaccgtctctccctctcgatcccgtccggtttctatcgatctcgtaatagaaaagagcgaaacaaaagagagaaaaaattgtcatgccactatgccagttgcatcttggcacgtggaggtattccatatactcctactttttttttcatgttaggtgagacgtaggctgggttaacgtaggccatctttagttgtttagttgtaaaaattttaaagtatatggatatacatttaaagtattaaatatagattaataataaaaaatttcgcttgcaaactgcgagacgaatttattagactaattaatccgtcattagcaaatgtttactgtagcaccacattgtcaaatcatggtgtaattaggttcaaaagattcgcttcgcaatttacatgcaaactgtacagttgatttttttcgtctatatttaatgttttatgcatgtgcctaaacatttaatatgacaagatttttagaagtttaaagagaactaaacacagccacaaccgtagtacccagtcgtgttaatgttagctttggctgcagaattatttttggccaggacccctgcacctgcaggaccatgggtcagtagatcaccaacagaggaatggcactatagcttagctagcggctcgcagcatgaatccatggatcagctgatgagctgaccttgcaatataatcaaatctgcagtcacctaattgtattaattgcgcgtgttttatatccgtactaggtgcgattatgttgagccccgattgattaattgtctaataaggtgacctggcccatacatgaacacagccaactccaccctaataatcttctccggccttttggcctctagggcacacgtaaaggtgcgacgggtacacatgcatccacaggggcgcaaattaagctcgcaaaaagtccaaatgacacgccatggcagcagcaaacgacgtactacgaatactgttgcgattttttcacgcgaattaaatggcgaccgatcgatcgatcgatgtgtgcatagtgcaaatcgattcatgcaggacaagactgtacattacgacccaatggacgctaccgatccgggccgatcatcgatctccagactccagctcgtacaatacaacagtacttacctttaaatgtggcccctcgaaaaaaaaaaggaaagagaaaagcacctctactgtggggatcgacctagatagattgcccattacatcgtacacctctctcaagttcttttgttcacgtacgaagaacctgtcaccgtgtcacgttaattgaacaggtcgatcgtttctttcctcagattggcccatcgatcggcctgtgcagccctgcacttgccaagtggcgaggacgaggacgaggacgaggacgtagctatcgaggtcgggcgatgctgggaaatgcacgggccacttggcaagtagcacggcgtggccatgggcgacgtactcgtactaaccaccagggcctcgatcgctgcaactacaactgtgtcccgtagtggccacaccacgtacgagccatcagtggaggagttgcccaactgttactgtctcgacagttacgttcctaggcagaattaacgcacgagcatgtacttaattaataaatagtataatgaagctatgtactccactaagtgataattaatgtactgcatacgctgttgaacgtgattctttttttttctctatagtttagtagtggttttgttccttttcttttccccctactttcccttttgttgagtacccacagatcgatgatgatctggtctgcaactctgcatggagacaaacgggcaacaggataccctcctccagatcaagagcgattaactcatataattatataaacatgtaatctttgatgtactatagcttcctgatcaactgttctttgctgtaaaaaacactgcaaatccgcaggcatagtatacgatcgagtttcagagacctggccggatttgcctgttgctagctcccaagctcggaccctgtgtagggcagagtgatatactgatgatcatcagtgctagcgattccatcgatacatagtttgcattattaattgcaaaccccacctattgcaagcaagatccaaatctctaggatctctggatggaagattggacgcatttttaatcctcgcatgatcccaatttagtacaggctgtagttgtatagtgaagttcgtgttaagcaaccgagctaattatataattgcttttgctagttgatggaatcgtattttttttgtgggtttatttttctggtagtgataacctataggcaatctgaattgttcgattatgatccgctggtgaatatatgccctaatgcaattaaatcatttaagctcttctgcattttcttctcttcccatctgatgagtcataagtctgaactctgaggaagcgtgaggcatgctaattgctatcatgtgaaattgtcagagtaatgatttcccatatcactgctatcgtttgtctggactctagaggcgacaaacgtgagtaatgtgccatctaattctgtactgagaccccaactgtggttaattagcgattactactgtcggttagctagcttgttaataacaaggctaatcatgtcatactaactatctcacagagcacgtacgtgaacttgccgtcagcgcgtgatgtgtacgttctttagactagcattttgtttttctgccaatcatatggagtatatttgcctgaaaaataatcatgtggagtatacaagctagtctaactgcatgacaatcacgttctttgggggaaagcaaaacaagtatatatactcgctgtcgctgtactctcgacgagtctccactttgaccggaaaaactattaattcgtccaacacatatcacactgcattgagtttctccaagtacatacttctaccgttttttaatagatatgacttgtttttttatttatgttattatatatatttgaccatttatttaattagataaaaaagatagtcgttatttttttaaccaatttatcgttacaggtatttaaacatgttgtttttaactttcgaataatattaacagttaaacatatgtttaaaagttatcagcgtaagttaaaattaaatagagggagtaaatcgcttaattagcagtaagtcgagactcgagaccagtcatcagagtatcatgtaaacgtgtaacttttgtgagatgattctaataactcgagtggacatccgcccgtttattacatgtcaattagatggttacgaaaaattttcaaaaaaaataacaagatagatcaatatgtaatatatcactccacaaacatgtaagttcaaatttgacttctacaagttgtaacaaaaataacaaatttgatagtaaatatgaatttttgttcatatttgatagtaatttgagttttgtttgttatttttgttacaatttgtagaagttgaattttaacttgcatgtttgtagattgatatattacatagtgatctatcttgttcatatttttttcattttttttcataaccatttagatgacatgcaataaacaggtggacgtttgctcgagctgttaaaagagtttccctaacttttggagctattgttgtgattgcgatcgaggtgtgctcatggaagcaacgtacgcgatcgagttgagcagtgtttccggtgtccagtgaacaacaagccgccgcttgccgcagctccggcggctcccccgtcgcgacgttgtcgtcgcgtccgtcgatagatgccggcgtcaagacgatcgaagaagctagcggctggccgcgcattgacgggtgccgccacgcacccgacgacgcaccacggggtgcgcatgcatgcggagctggagagcgatctggcttgacaccgtacctgatctgaccaagggatcgatcacgcacggccacgatctgaccgacgagatcggccgctgctgcgcctggtcaacaagcgaaaggaaccggcgctggcgagcccgccgggccgtgtgcgctttgcgaggcgggatggcgaggacgacattggagatttcaatctcttcgactcgccggacgttctcctcgaatttagcgtacttcgcgttgccgccgtacgtcgacgaacaactacgacgaggacctcggacggcttccacttcgagacggcgcaattgctgctctgggagcactgacgaacagttgcagtggggcagttaattattaacgcgctgcatggatatgaacttaattgagcctagctatctagtttcgatgatcgtccgcgtgttcgtgtttgaagatcgacgcacgaatcttttttctttgcgcgcgagaaaaaaagacacactagtattgtgatttgatcgatctatatactcttggtgatggacttgcaagtttgtgttgcagtaatcttaactccttcccatctccggcggcttgccccgctggatcgcccgagcctcctaaccactccggtgagtcaccccccacccccgacacctgaccaccgaccatgttcacccctacggctccggcgcctcacatcccgcttgtctctactacccatcactggtctttcaacacccggccatctctctaaaatcactgtcatcgtcccgcaaccttctcacatcgtcttcgctataaaaccttaatacaaaggaagcattgtcatagttttgggtgttgccggtgctaaactgccaatgaaatcgcctgtgagtccaccatctcgtgccctttcctctcttcctgcctcccccagaggcaaggccttggccaagctatggtgattttttattgttttggtccactatggtaaaaaaataagttttgacccacgaactttcaaccccattaccctgagcaagacctatggttcccgggatctagatccgcactactcctcgggccaatccaagcttgaagacgttgaacagctaaggttggataactggaatttctcctaatttcagtcacctcataaatagcaaaggagttttgaaaaataaatgctcccataaaaagtagacacattgcgaacagccaaataaggtgtgatcgtttggtacatttgtcatgtaggtcatggctatggctactagaatagggtagcctatggctatacaggattggataacttgataagtggggttcatgccttcatgtgcaattagacatatttttttccgctgttattttttcttgttagcaatgcacactaccaaaaaaaacttaaacttattattcggcaccaatggcccaagttattggggccggattttgagccgtagtggtgcacctattttttatatttttttaaagtgctaaaaagaccgaaaaaaatatttggtatttatattaagcacctatacggtcacactttttccacaagtcacatgattttttttaacccatattgatttacatgggtcaaacaagattcgaattcaagacctctctctccacccaaagcctcctttccatctcacctgtaaaaccgagttgtcttgtaaacatacgctattcttttgagactaatgtgaccgatatctttaagaaattttaaatattcactttcatacatgttttgtctccatccggtatcgttaagaaattataaatattcacttatgcaaatagatcggagaccttgtaacatatttttgaacattcaaacggccttaaatcgaaaagtcatcccgtacaaagttgtagatttcgttgagctctacaaatttgatctattgtttatcttcatctgacttcatatgaaaaaattagaaaaaaacatacatatgagttgcgtcatcataggtgccaactttattgtaaaccggtatctatggactcgtaagtgctggtttttaataaaaagccaacacataggtaatgcccatctgtaccggttcatgataaaacccggtacttatggcaccgtacttataggtgccaatttattattagaaccggcgcctatgtgttgttcataggttccggtttgttataataatctgcacatatgattttggagaactattggtgctggtttttgttataaatcgttaccaatgagtgattataggtaccggttcttaattttacattgaaaaagatgaaaaaaaaagcttcatacatttcgattttaagcaaaccagtatttataagaccgatttctatgtgatgttttgtagtagtgacaattagtctgcgaacgcagggccaataaataaagttggttttctcaaagaattaaaatcccaagccctatcgtgttgcagccagccaaaagtaattttggcacagattaactgatcaattggactacgacgatttcagcaactggccggtttacgaagatttcagattcattaatgacaataatcatatctatgatgactgaaaatgcattacattaaaacgcgatcggtacgacccaccttctgtacatacggcaaacgaaatggttctgtgtcgaattttctcttgattaacttcattcatagaatgtccttgtggtgtgaactgtattgtgaaggaaaacaaatacgcactcccaccagtcgcaaaaaaaagtgacgttttggaaagctcgcagtactcaacatgtttactttaaccattatttttatctttaaatatttcgatccaactcttaaaagtgatacggtatcttcgaaacagtactccctccgttttataaccagattacaagaagttttaactttgattaaaatcaaactattttaaatttaactaggtttataaacaaatatagtaatatttataatactaaattagttacatctaatcaatagttgaatatattttcataataaatttgtttgaaaatgttactacttttttctacaaacttgatcaaacttaaaacagtttaactttgactaaagtcaaaacgtcttataacctgaaacggagggagtaataaatattatgattgcgtgagtattatattttctttatatactactctctacatgtctatattcattaacatatatatgaatgtgagcaatgttagaaagtcttataatataaaatggaggaagttttctagtactagagtaactagcaatcaaactgctactattttgtgacaggagataggtcccgttattttctccaacaagagttggatgaagaataatattttcgtgtcacgctctttaaactgctaaacggtgcgtttcgtgtgaaaaatttctatacgaaagttgctctaaaatataatattaatctatttttcaagtttgtaataattaaaactcaatcaattatatgttaatgccatattgttttgggtaaaaaacttaatgttcatcttcttaggactcacgagaaaagaatactgtactccctccggtatcaaatttgttgatgtttgaggcttgttccttttggatggaaattatttacgttttggtatttgatggtcactttggactgctatacccctatatgcatgcaacgcttcgttttggcattcattgaaacaatgcacaccagctcaagcatgcatgcaaatcacattaatcccatcagctttggcgcatcgtcttctacccaagcaccagcgcacaaatcatgggagtgactcaaacgtaattaatactataattaatcacttcttggtatctgaaattatgttcaaaacgttaaaatttgaaacggagggagtacgcagatactagcacactactatctgagtactatatgcattacaatgctcaatgcacattccttgctgctcccgacgatgtacgctgacgccatgcaggtgtaagcccgtatctcacttttacaaatcacgccatgctttgcatgcatggaagcagtacacatgatgtatcccctagctaagctagacaacgagagccaactaccgttctattctcgatagcctcgtttgtccctattaattatatcttctataagttctagctagcccgatagatcgatcgagatatattagctcctgaacagacgcacacgtacgccggccggccggcgacgtaacatcatataattccctgatgatgaaccgattgatgcttaataaaatatgccacaaatcagattttgtggttgatcatttatcataactaccgggcgcatagagatgagattaattagcatagtagcatatatactatatagtctattataacaaagcccagtgcagtttggtggtgagtcgaaccaccatcaaattaaatgatcagagtctcagtgccgtcttccatgagcaaacgatacagagtttcccctgctcaattcagattttgttctgcgcgcatgcacctgctaaattaatcacgcttactaattgtctactactactactatagtacgcaatgtacatttgattagtctgttcgagggtaatatatagcgtggcatttcttgtgcgtgtccaattgaatattagtaagtgcttacaaggggacagctagctaacctcagtgcatgttgtgtcctgatcaacatgtgggaaattgtggagggactaatataaatatataattatagattttttttcagcgcatgtgcatcagcttgttgtttagtcatcctgcatatatattcgtatctcgcttgtctactacttccttcgtttaacaatataacactttctagcatttttcacattcatatagatactaatgaatatatatatatataataatgtctagatttattaacatatatatgaatatgaatgtggacaatgctagaaagtattacattgtgaaacggagggagtaattaatttcggtcgcttgcaagcagactactaaaccgtatatattatgatatatatagtcaatcgtatatagtactgatctgtatgtagctagctagctagcatgccgttcatgcatgcatgcaacttgttttatccctattttgtactggatcgatcgatatctcgatcgagtgcccctacttctttaattctaccatttggactcaatcatgcgctcatgacaactctgagctgtattttagtactcgcaggcgtcaactgatgctgcaggttggccctcttatattagtaacttattgagctaaagcaaaacaggttaatcgcaaaaaaaaaaaaagagaagcaaatcaggacagaagagtgattaattaaattaggtgctcgaagattttaattggatcgccgagctgcggcgcattgttgtgctcaacagacagcaatccctggccatgagctccgtgcaaattaagaatcagcatatctgaatactagctggtggctagcttaatcatggcgaaacactacactgtagtactgtagagtataacaaaaataggggaagatttggacactgtacagtagggcattcgtagggccagaaccaactaatttaaacagtgtacacatgcacgtggttattagttaatttggcacttgacagtacagtatcttagcgcatgtttaattatatatatatatatgatgtatacaggattgctttgcttatagattattggatcggttacgctatctaatcacaatatgcatgcccaccagccggccagattaagctatttcttcagagtgctatattgttttttgatttgagaaagaaaatatcaggatgtgctttgttaatccattattagttttcccttgcattgtcgaccttcctctaacaattcccttcctcttttgggtcacccaaccaaaaagtttgtcgtagtccataagcacttattattcttatctaaataattattcttctgaaaggaaacggtactcaactaatcatgctgtccaaagtctaaaccgagctcttctagcttatggtagcaagtacattgatgctcgagtgtagctagaacaatgcctgactcgtaatcacgcattctcatgtatcatttcaaaatttcatgaatgatatcgagaaatattgggcactttgtttatgaaaagtgtaaataagtttttcttttctgagtaaagtacactaccgatctataaacttgtacggttgtgtcatctagattaacaaactttcaaaatacatattcaggttttaaaatttatcaaagtgtcgatgtgtcactccgatctcaaattaattgacatggtctcttcgagattctacgtgacgctaacatgcatatttaccaatcctacaccaactgacaagtggggcctagttaaaattctttttttcttttccttcctcgtttccttttctcttcttcttcctttatcatcaagactccatttgtcaatgtagagttaatgataatgccacgacggcgttcatttggcatgtcacgttaacgccacataggatcttgcagggggcgtgataatttagaattggaataacacacactttgactaattctgagatctaaatctttatttttggagtttgagaattcagatgacacagtcgtataagtttagagaccgggtttgaactttactcttaatttcctataaaaataaatgagttccttttctttgcaaattgcaagcatctccccttcaccaataatactcttgatctgtcacctaattaagctgaacagtaatgacgattctgttatctgcatggtatcagcgttgccaacaataaactagctatagctataggcctccttgccacgagcaagacaatcatgcttagttggaggcattattgaactgtgtcgatctagagacaattaatataagggtggtggttacggctgcaacatcttctataagaaggatcggtactgatcttggaaagattgaggctagctatatatattttaggcaatcatcgatagctaagaccccaatttgtatatgatatattccactatagtttggctcatctgcctatagctagctacaaagtttatatattaccgcaaaatttactgaatattaattggtaagatatgcatatatagtagccagtaggaggcattttgctgtctggcagtttgagaaagaaaaaagagagcttttgcttcggtgaaggaagtgcttaaactgccaacatgaggcggttccatgggttgttaaaggtgactgttgtttaatgttcgaaaacaaaatccttctgaatccttgagatcaactcagacctaatcagttgagtttaagttggcattggcttcagttgagtttgtttaagttgatccagtttaagtcttgtcatctgaatcctccgggcgattgatagggatcctttttgcccaaacattacgttttttttatggaatactagaaatattggcgcgctacgccgcgcctgaccatgatgccgctgaattgagtatacataattgctcaaactggttcaagagaattaataattgaatattgtatcaagcataactgtcgcaatatattgaagagacttaattaccattaacttgtacacacaacagaaggttgtttgcaagtttgctttggcacatatatctgaaagtagagaaatcagcacattgtgtattggtaaactacagtgttcacttgtggtgaacaatcatatcatctttgtattggatcagtgttaagtagtgctaagaattgaatacttcctaatagtctttcaatacaaattaaggaaaagagattaagcaatgatcatatcaattcttaccaatgacatatatcatcaatgtttgccaatgacaataattttaaatcaacggattaagatacttaaatatcccacatctatacaaaaactacatcactttccaggagttctataatttctctcccatatcaactctggtgaaaaggaatactatactaattaaaaagctttgagtagcatctatatttatcactgatgctaggtagttgtgatactatacagaactttgcttgttcgaattctgaaaatgctccaacaaaaatatttccattctaaggaagaaatgaatgatcgtatggttggactggaaaatgtaacctgaactctacatatatacaacacagctaagtttgtagtactaaaaaaagctagcaatatgctaaagtgggtgagaatacttgttgtttctatactagcttttacctcaatgcaaaatagaatgtagtggtcggagaagctttctgggatggatcagcatggtagagaagtgtcacttttatcctgccatcactccttggtggactattgaaagtcacctatgccaaggacgaagaaattggggggggggggggggtgatgtacagctaaccttgagacgggaaggccgggcagcaaatcatcaggtaacgatggcggctgcgatgaacctgtgccagtgacctacaacagtctaaatgcatatcatagataaaaaggggcgtaagctagtgtatattatagccgaacctgacactggatatttgcaacataaacatttatttaatgaaagattaaaaaataattcaaggtaaaaccataaacatttattcaataaagattgaaagaaaacaattatttcaaggtaaacctgtgatcaaaaaaatgatttaatagggtcaagtctgattcattctaccatagcacaatatagttaaaatctggagacatctgtagacacttaagactcttttaatttgcattcagtgagacattatcaatggatcgtaggctctcctagctagtatgtcttactatacctctagctaagaggaagaaccaaattaaggtacacagactttaatatgcacctcatgcaaggtggtgtaaaccaaaaaaagtcccatggcttcaacataggtcaatgatagctaaaatttcagttataaataagtcatgatgactttataattttatatgttgttttaaaaagtaattgattctaatggaggaaaaacagaactcacatagacatgtcacacttcatatgcagtggagggataccagaagcttaaaaagcagtaataaaaaacagtagggcatttatattatgatcctaaaggctttgagatggatccacactatttatgtttctaagtgtacatcttatgcaggcaaaaaagaagcacaaatattaatctcaaagcagtctaaaaaggaactttaccttggcaagcaaagagaatcattgcatacatttgaaaggtatcctaagcttgattaaatgcaggaaagccccaactgtaagcagggaaccacatgagggcgtctttgttggcactgcaaaagggttgctgattggatggaaatctttggcaaaagagatgaggtaagggccagagaaaaaattggaggtactaggaagcgacgccgcgagcacggccttgccaacgtcgacctcattgtccaaacatccaaatagaagctacaatagttggcaacatagtattaaacatttacaacaaaagagcatcgaaacctccaaatagaagatacaataattggcaagtgcaactgcaaggcgatgcttctatattttgtgtgtgtgtgtgtgtgtttttgtgttatccatgtggagcacaatgacagctgaccatcacaaggataataaaatagatcatgtacacatatatatagtccactcatgagtgggtaggccacgatagtgaatcaaaaggaagcgcaacttcctgaatccacaggttctcttcacaaattttattgcattcaaatttaatgtgacgaattagggatacggctattcgacatctttagggaccatctaagttgctggtttttactttgttaggtgcaactattctgatgaagtcttaaaaagacctaattgaaacatcttaagttggccaatagcaatatagcatccaagaagaccatgatagcaatatgtatgtttgatcaaagtagtatcaagtaaatcatcatacacattcatcaagatataaaaagtacaatagaactggcatgtttaatattatgggatccacaatggtttagtaatcctatcttctaggttacaaaattgtgaagagaaaaaaacaaaaacaaatgctccttgcacctacctccaagggaaaagagagaagagggacatggaggatggggagcaagggagtttaggactaacctgtggaggggaagagtgtggttgcggatcgacggcggcaagtaccaccggcggcttgtgccgacgcctgggacacagtcaaggcagtttggacggaggcggtggcatcgggatcggcatcggaggagagggcagcgacggcggcggaatagagagcagcggcggcggcggtgacggagagcgtgagagggcagggcggggcgagcccacgttgaaggtgtaaagaagtgaggagaagagggcgaggagagctggagggaggagaggaacagagcggaggaggccaaggcgaaggagccaccacttttgtcatgtggcatcgggagcaagggcggcggccgcagagggacatggcggcggccggagcagcacagtagaggagaagggagctgcggcggcgacggcgacggcgatggcgcttgcgagcggaggaggtgggcatctgggcgccggatccaccggcgaggagaccggggtcaccggatccggcggccccggcctcctcactgggagatccggcggctcattgggagggagcggcggcggcagcacggtagaggagagggagctgcggcggcgacggcgcacgcgaggggaggaagcggcgacggcgcacgcgagtggagaggcggacgaaccgacgcgcgtggggagaggataggacaggtggctagggtttgtaccggttcgcgaaatctaggccgtccgtccacaatccgacgatcgcacgggcgtggaagggccggcacagcgggacacgtggacggccagatcgaccctacggcgagatcggacggtggacagcagcggggaccggtgcataattaatcgaaaggggaaggttttttttttgcaaaaattgctgacgtggcgcccctaatattacgtcttcaatttgagaaacgtctagaggtcttccgactagctccacaaggtagtgaactagacgaccaggattcaaagcctcgtcccttctaattatttaatattatgtccattctaatattcacatctgtttttcttcaatttgatctagttgtatcttggaaagtggcatgtatatatataactctgagcgtaaagatgctgcaagttttatgtcaaggagcccatttgagtccagcctcacatcaccacttgatctagttgtgtttgtaagtgtgtcatgtatactcctctgtaagtgtcatgcatgtatactcctttctataatgtatataggatctcatgaaaaacgaggcaatccagacagaaaaagggaataaagcatggcctgaagctacaaaacaaaaggacggtacggtgttaagaaaaaagtgaagcgactgcaaaactgaagcagtacatcatgatgttgctagaaacaaggtcgacgcaacagtaatttgggaccttgcctgaacgattgtagaagtaacccatgattgatctgcataaatcttttggatgatttggatgagtctagctagtggcggaaccaagatatgatcgcatagagatgagtagagctgagttgatgtgttcttggcatcactttatatcttcagtttttcacagtattttttataagagtttactgggaattcgattttaaacctagggctcaagtcctaactcctaactgctccacccttgtcttccgcgtgaatttgattccaatgaaactatagaattttcgttcaattaattttgggtattctagggagattaagcaaagtgcccacaacaatcagcacagttttagtcacacgacgtacggtaactcggcgtatctcatactccctccgtctcataatataagaaattttaagtttttgcttgtttgatcactcgtcttattcaaaaaaatttaaaattattgtttttttacttactttattatccaaagtacgttaagcacagcttttcgttttttatatttgcataatttttttgaataagacgagtggtcaaacaatacaaacaaaaactcaaaatcccttatattatgggacggagggaaaatctcttatattatgggatggagggagtagttaccgttttaattgctgtactatctgcaaacagacagctacctgaatagaatatttagcagaaatgcagaataacagtactgatcccgtgtgtcaatcagtgaaactagaagaaaatgctccgataaatagtaaaaatgattcccatgggccggccggacaaatctgcgtgatggacatgtgtagcagcgatcgagctacaagcacaagtgtcagcaccagaaaggttggctattaatattcctccaccaacacaaacgaaaaggaaacgaagggaaaatgaaaattttatattttaaaatatatacaatcaaacacgcatatgtatatatgcaccgaacttttccctttaaaatcatttaagagatttatgccacatcgctaaattcttatcgaaagcatacatgtacatgtgtaattatgatcgtccaataaacccaagagaacagtgaatgaagataaaatgtgtaaggcaaattttgctacaagacacttgttatgtgagattttagccctaggacactacctaaacttatttttgtgggaaaacactccataaacatggtaatttgccagtggaatgtcgaaaatgcccttgggcccacatgtcagctctatctcatatctctctttcctctctcaaagcgcctccacaccgccttcgaggagcacggcggctacccacgatgccgccatcgcctccctcctccccgttgtcgttcgagtccgactcgcagtcggagtccgggtcgtcgccctcgcccttccacgctgtccgcggccaccacccgccgccgtcctaccgaaagacgaagcagagcagcgaggcgcgcgcgcgagcggttcccctctcctcctcatccggaatggcgagcgcggcggcggtcgtcagatccgcgtccgccacgtcggcgttggcgtccgccaccggcttgggcggaagaagcagctccgcggcggcctcgcggtagtcaacgggctcgggcagtagcagcaccgcttgcggcgggaggtcggcagggcggcgcgccggggccggggccatgaggaggaagcagacagcggcggcgagggcgagggcggcaccagcgggagccatgctttgctcttgtgattagtagtaatactagtatttgtggatttgctcttgtgattagtactctcaagccgacgctgccgctccgccgaccgccgtcctcgccatctccgccgcgaccgacgccacccgtgcaagcgcactccgagagagaagagagagatgaggagagagacatgagatagagctgacatgtgggccaagggcatttttgacatttcacgcgatttctctctcctccccaactggaaagtattattttaatcggcgcggtgtccactgacaaattactacatttatggagtgttttccctgaaaagtgaatttgggcagtgtcctagagctaaaaccacacataacaagtgtcctgtagcaaaatttgccaatgtgtaatgtatgagcgtcattctcctaagcgcggagagccagcagcctataatgtctacttttcatatattttacatcatgatttaacctttttataagctcaagctatatggttataaggaaattacatgtttccttcattgtcgactattcaccccaatgagaaccacttcttcttagataagcttggccacattacaggtcctttcttgttcaataagacaattgaccactttcctagctcttacgtgcctcgctcagttgatatggttttcgctcaaccgaagttgtcttctcctatctatcaaagttcttgtcatgtaaggctgtgtttagttcccaaaaaaagttaaaagtttggaaaaagttggtagtttgaaaaaaaaagttgggagtttatgtgggaaggaaattgattaaaatcgggcgaccggggggaggtgggaaaaatcggtcgctccccctccccccatgcgcgcgctcccctctccccatctggacccacccacttatccctccccttttccacaaaatatgtttcaccaagtgtacttataatgtttcactatgtatagatataatattgcagtgaactgaaataatctattgtaacaaaaaagcccacatattttggaaacccaatattaagggaatttggtttattttttgttccaccgaaaaatgtttcacctagtgtactcacaatgtttcattatgtaaagatctaatgttgcagtgaacgaaacattccattgcaacaaagaaaccacatattttggaaaccccctattaaaggaatttggtttattttttgttccaccaaaaattgtttcaccaagtgtactcacaatgtttcactatgtatagatctaatgttgcagtgaactgaaacattcttccgctatttgaaacattctttcgctatttgttgaaacatcgtttttatataaggtgaaacaacacccaatttaaccgagtgaaacattttcgatctacttaatgaaacaattccgatatacctggtggaacatcgttcaacatttaaaaataattcaataataagctaatttttttcgtcggaatatatccatatgtggtcttgttttgaagatttaattgcaacgaatttaatggtgcaatcggatcatgatttggataagtaatttaggagaaaaatcggtttaaattagttttgcacgtaaatcgggcgctgacgtcccaaattttcttgaaattgtcgggcgcccgagccttaggtagccccgtttatgtgtgtaggaaagttttgaatatgatatgatgtgatgtgatgtgatggaaagttgaaagttgagggtgaactaaacacggcctaagcggagttctctttgcctgtcgagtgatgttattgttggtcttgatcagaagctatcttcaaccatctgatgcggtctcttcatctggtagaaggagttttgcctattgatcgaaagagttggagacattaatgattgtgtacaacaagttttaaacatgagaacattctttatttaccatctaaaaatttgattgattctcccgtttgtcctcgtaaaattggctccctctaatacacctcttcctcagcttttagggagcgcctatggatcgggcgaccgatccggggctaggaaatcgggcgctgacgtcagcatgacgtcagcgtccgatttacgtgcaaaacaattttaaaccgatttttctcttaaattacttatccaaatcatgatccaattgcaacattaaattcgttgcaattaaatcttcaaaacaagaccatagatggatatattccgacgaaaaaaaattaacttattattgattttttttaaatgttgctcgatgtttcaccaagtatatcggaattgtctcactaagtagatcgaaaatatttcactcgtttaaatcgggtgttgtttcaccttatataaaaacaatgttttagcaaataacgactatacatagtaaaacattatgactacactaggtgaaacatttttcggtggaacaaaaaataaaccaaattcccttaatagggggtttctaaaatatgtgggtttttttgttgtaatggaatatttcgctcactgcaacattagatctatacatagtgaaacattgtgagtacactaggtgaaacatttttgatggaacaaaaaataaaccaaatttccttaatagagagtttccaaaatatgtggttttttgttgcaaaaaagtattttaatttattgcaacattagatctataaatagtgaaacattgtaaatacactaggtgaaacatctttttatggaaaaagggggaagaagtaggtggacccacgtgggggaggggcgcgtgcggggggagcgcccgatccggctccccccgcgccggtcgcccggcgacaagcatttccgcagcttttatcctttgtttgtaatttccattggggttatgtcaacccacggttagtaggtgggtgaaaagataatctttccctttatttgttttatgcatgatccgcaaattttatattttcttttgaggatcgttttttatacttgtttattatgcattgatgattgaatatctctcaagaacctaaatgcaattttagtaatggagtgaaatgcaaaatcctttaaatgtagtatgttgcatttgtcttggtggaaaccggtccaaatttcaatattttccggcttgttgaaaacacaaaccgcttggttttcggtctagttcaaaaattttcaaactgaattttaagttttgacatgatttatcttgatttcattttctttttgttatcaactgtttttacaaaatccaaagataccactcgtgagaggttttgatccaatatcaaaattgcgaatcccaactcccggagtggaatgaaatcatgcatcaataattccatcaaggtgctaaaggtgtgcattgtgctttcctataaatcattttttttgaacgaattataaatcattttttcaatcgatcactaatgtaccggaagtgttctcacctagacgctcaaaggcaactcgtcaccaagaaagccatcagagttaaacatgtagtcattccaagagagacggagtataacaaatatagtacctcatctgtctcaaaaaagaaattttacatggatgtgatagtatttgctagtactaggaagtgttatatcccttcaaaatctcttatactccctccgtttctaaatatttgataccgttgactttttagcacatgtttgaccattcatcttataagaaaaaacttttgtgaaatatgaaaaactatatgtatacataaaagtatttaataataaatcaaatgataggaaaagaattaataattacttaaattttttaaataagacgaacggtcaaacatatttaaaataatcaacggcgtcgaatatttagaaagtagtatttagcaatagcttagtgcattggctttaatgaacagattcgatgaaaaacaattcacaaacaagtgcgttttccagatgtcccatattgatgacaaacccgcacacccatgaattgagtcccaagagttcatcgcagacttgcaatgaaacctgccactaacatcgaggcagttcaatcgcaaaaaaacaacgcggctgcagaggtcctcaaaacccgtggtgattctcacccagtcgctctcacccattcgcattctccccgcactattccccgccttgtttccctctttccacgtcgcgagaggcctctgcgccccatccgctcatcataaaaacccaccactcccactgctttccctcccacctcaccacacaccacgccactcgcctcgcctcgcacagtcgctcgctcgcccgctctagctagctcacagctcgctcactcgctctcctcttccaaccaactccaccaccaccaccagtccaccacagcgcgcggcgccatggacgactcgtcgttcggttccgagccgaccacgtcctcctcgggcggggaggcgccggcctccccgccgtccaccgcgtcgtcgtcctcagacggcgccggcggcaagaagaagcggccgcgcaaggacgggcaccacccgacgtaccgcggggtgcgcatgcggagctggggcaagtgggtgtcggagatcagggagccgcggaagaagtcgcgcatctggctgggcaccttcgccaccgccgagatggccgcgcgcgcgcacgacgtcgccgcgctcgccatcaagggccgcgccgcgcacctcaacttcccggacctcgcccacgagctgccgcgcccggccaccgcggcgcccaaggacgtccaggccgcagccgcgctcgccgccgccgccgacttcccggcctcctccgccaatgcgggcgccagcaataaccccgacggatcggacgacgcgagcgccgggtccgcctcgccgcccccgccgccggacgccgctgacgacgcgctgttcgacctccccgacctcctcctcgacctcagatacggcccgcccagctcgggcctctcgtgcgcgtcgtcttgggaagacgaagtgggcttaatctccggcgccggtgccgccgccgccggcgtgttccgcctggaggagccacttctgtgggagtactaaaagccaaagcgccgccggtaaaacactcgtcagtgctaaaatcgagcagcctgcatgtacaacccgtaattttccacgcatgaccaaaagaattcatgcatgcaagccagctacggcctacggcgcacagaaacttgagccaaaaaatcagcgtcgttttgtcctgcgtttgcgtcgccaaatttgggaagcagaccatgtataaaaaatcatccttcttttccttcagtctctccttcctttgcttggattgtggggcaagaatatgtgtccggttaattaatttatcagcgcatctccttttcctccgggggtcatcctatattttttctatctttagcgggtagtgctaaaggtgatgatctacccgggatttggacctaatgtgacacgaaagaaagtctctaaataaagatcgatgctgcatgcatttgcccgcacctttgaaattacggcaaggttcgatcgatccgggcccctccacttcgtcccatcccaaagcgcgaacaatcacggcagttgtaattaaccttgttccggcacagacagagagagccagtcacttcctttctctctgcagccgcacggaaacaaaaacacaacggataattcgatctgcggcgtgtgcgagaaacgcacgaaagatgggggtgtagtacgctgaggcgtacgttgacgcggacggccatgcgtggcgccacgccccgcaccggccgggacacggacatgcaggcagcgtcgcagcgaggacagcggggtggttgcgcgcataaatatggccgggccgcgcggacagtgagacgacgggcgacgccgcgcgcgggggggataaggcgagatcccatcgcccaatcgatcgatcggtgaagccaacgcccctgtactcgcgaccctgatctccctccgtctccgcccatgtcgtaacgcattcgtcatttcgtcttgggcttgtttttagggatgcttcagctttataccagctcgagttttttttcccaaaattaaaagaatttttagatatatttgtgtgttcttagaattttaaactctttcaaacagaagcttggactcgtggtgcgtagctgtgtgactgtgttgatacatgcgcacgagcaagggcatggaggtgatgcggtgatgctgctactactgttctgggggaacggagggatgggagtcgttatttttcttcaaagggacctcgttttcatgtgatacgtactatacgcgcgcgcgtgcctactcttctggggggaacggagggatgggagtcaagatgggttgcttgtggtcatccgtgttaccggtagtgggaagttgggatccttgtttcaggggttaactccggtgagcccgttgtttgtttctccttgagaatgaagcttctaaaccgcgtgctttaattcgtgattttcattgtcatggctgattaggtacgattttcctgatttgaagtaaagccttgaatacacatcttatccatcatcatcatacacatcggtacggccttaaatacatgttttcgtgaggaatcatgaaaaccacccgtttgatttccacttttttttgttactctcaacaatttctttcatttttagtttgttactgatttccaattatcgttctatatttatttctctctcttcacatgtttatcttttcagcaaaaaagcaagtttgtttttttttcccaaagcagcccactccctacgtgatagccattcgccaaatccatcctacccataagcggcatccgtaatctcacttcgtgacaagaccatttgtacgtaaagttggcaaatttttaattgaattggctctgctgttcacacaaatcacaaccagtaataggcagctgtctgatccccattaccaggacaccccaaattatagatgaaaaaagcgtcttttttctgggtaattaattaggactgttagtaagatggacgtccaacaatccacatgtggatcacacccggagatgaagtgagttgtacacccgtacccttggcaccttcgccagcaccagagggttcaggtcactatcagccattaaacaaagcttttcttttcagtaagcttgaaagacacaataatgaacttgtctaccaacataacgtgttaggagtaatttgcttcacttctggcgatagcacaagaaatgtggagtatggcttccttggccaattttttttaaagtatacgcacacacatttaaagtattaaacatagattaataataaaataaattatagattccgcctgtaaactagaggcgaatttattaagcctaatttattcatcattagtaaatgcttattgtagcatcacattgtcaaatcatgacgtaattaggctcaaaagattcatctcataatttacatgcaaactgtgcaattggttttttttcgtccacgtttaatactttatatatgggtccaaacattcgatatgacgtttttggcaagaaaaaatattaaatctaaacacggcctatggccttaataaatttaatcatccccacgacagttcatttaaagctttgtaaattgggtaaattacactttataccgggtaatgtgccttgttacctttttatcacatatatttcacttcacactagagtttattgatttaactttcacttaacaccaggatacataatcatcacacacacacacacacacacacacacacacacacacacacacacacacacacacacacacacacacatatatatatatatatatatatatatatatatatatatatatgaaagggctttcatgatatttcattattttaataaatccctttcaaatattgtctaaattcaaaagggttttgaaagttttacacatattttacaatattttcccttcaattatatgatacaacacctagtgtgaggtacaatttatttcaatgtaaaaatatgtattaaatccggtgcaaagcaaaccaaggttcactctatccagtgcaatatgcaatttacttaaaaaaaacctaccaatgcgtttcatatatcgtgttaaaataaataaattgataaagctaccttaacaaagctttggataaaatattttaaatgcccataagaaatctatggtttgatttaaattctactcatgcaccctactaccattagtggtagaaggtactgaagagtgttggtcaatttgaaagataactgtaaaagtgccaaaatagcttacagtatctcgaaattgaaactccaacaatttgaattgcgttgaattatctacttacacaattagtctggtttgtagaatattttttcttcacctggttttgtagaatttctagtgttgtgtagtacttctacaagaaaacacgatgcttgttctacgtagctccacctaccatgtgggcctcatggggccggcgaacaatggtacgactcatatatgggctacaagtaacaaaggtctgcccaaacgtcttttttgtagagaccctctttttagaacaataattttttctagagactagaggtgttatttgcacccgttgcaccggggccaaacatatgcgtggtgtacaactggacatctctcctaggcctccgagaagcatagccggtggcttgaggtgctgagctgagtctgaatagaatcactttcatttctttcattcttttcacgagatcacgattaaatccttcagcagccagcctagtagggtatgggtagacagaccagccgtacctccgtttgctagctgcagccgaggggtgagagaccaaggaatggccaaaagtgctcgtcatataatgtgtggcagatcgtatcgcaccattttatgatgagacggagtaggtgaccttcaataagtagctgcgcaacattacattttttttatgttttcgttcttttaaaaaaaacttatttatattatgtcgtgacattaggtcacgaataagtttggagataaacaggaaagtttcttttctcgcctatccaaagaaatgagctcaaatacaaaatacagaactttgatggctaatgtttctctagtagtattaaattatgtcttgtcttgctacatgcttttgatcggcttatataccccacaatcgtacatgtgagattacaactttgcccccatgggcccttgtgagtttaaaattatactcttgccatgtcagcaaccctagatgtattatggtacattgtagaggtcattatggtcttttggcactagctggcatgagtgtttgaaaactggtctctatggaatcttcttttggcatctttcttggttgagtagctttttctctcgagtcattaggttgagtcgtcttttccatctttgttcatatttttcaacatgagtcgttttttcatcttgggtcgtctttccatcttgagatttcgaacactccttctcacttatatggctctcggaatttactttttactggttagaaacacactcaaacgggacgagttgcttcaatagcataaaaccactcgaatagaactttccactcgaatagtactttaccgttcgagtagtattatactgctctcaccgctaaaatagtattttaccatttgaacacttgaaaatctcaagaccttcttctctttagtgttttggctgaacagaaaggatggtgttagtcccctgcaagtacatattatataaatagatccctataaaaacttattataagatgagatcattttcttgaagtcaatgaccctagtattgaggttcaatgtcctagtgccaacaccctcacccctagaagccgagatgtaaaggagttggagacaaagatgttaacgtcgatgacctatttatattttttaaagaaaggttgaaatataacctttttatcacaaataagtcctcaaaggcaaagagactatcacatggtgtctatttataagaaaaaaaattagaatatctattattatattaaaggaatagaaaaatgagccaccacgttcactcttatggactagaaattctcacattaatcggagaaaaagaaaaggcagagtccatatagaaatacaatttaaaaatagcagaaattcggaataaaaaaaggaatattagaagaggaaactaaagtccatatagaaatacaagtagaaaataatagaaattcggaattaaaaataaggaatattagaagtagagtatagagtccatatagaaatacaagtagaaaataatagaaattcggaattaaaaaataaggaatattagaagtagagtatagagtccatatagaaatttcaaactaactaaaatttagaataaacataataaaattaaaagtagagttttgagttcgtataaaaatacaatttacaaataactaaaattcaaaattaaaaaaagcatgggaagaagagtttaaagtcaatataggaatacaatttagaagtaactgaaattcgaaattaaaaattaaagaatattgaaagaagagtttagagtccatatagaaatacaattagaaataataaaaattcagaaataaaaataaataatattggaagaagagcctagagtctatatagaaatcctagagtctatatagaaatacaatttacagaaaattcggaattaaaaaaagaaaatattgaaagacaagtctagtccatataggaatatatataatttacaaataactaaaatttgatattaaaaataattaataactaacacgtatataaaatacaatatgaatattatacatttttattttcgtaaagttattgcaaaatttaaaattatgatgtcattttaatatatttgaataatataatgagaaaacatatatgctattatatgagagaaaatataatgatgctagccgcgcaatctgcgtgggctaccatgctaattatttttttaaaaaaatacaaataggtcgtcaatgctgacccccttcacatggtgtcggtattagtgagattggtgcggagacattaaacgtcagcaccgataaccttggcaccaagaaaaagagtaaatttccaaaaaaaaaaagttttttaaggtttatttgcaaaataaattttaaagaaggatcacaatgtaaaaatctagctgcgctgcacatgtgcaccttcagatacggcccggttgcggtccggtgtggtactggtacggtccaccgagccgtccgcttgcggtgcggtgaatacagagaaaactccgtactgaacccgaagccgaggcgaaagaaaaaggcaacgtgatgccgcgtgcgggcagcgcgcgacgggggcgtggcagtgcgcgccccgtacgaaagaggtccacagtgtttcgcaggcggccgcgcgggtggccagctgcaacgctgccgcgccagcgcgcgggcgcggccttgcctccccgcggccccaagcgttgcgggagcggcgagcggcgcggcgcggcacgagtagtgggagagaaaacggggggtcgctacgctgacccgcgcgctgatgcctgcgtgcgcctgcgcgtatgtacgggtaatcgattgatttttctcctgattgatccccgtctgtcgtggcgtagtcacgctcggctcgatcggaaatggatcgagagagctgccgcgcgctgcggggagccacaacaagtagcggtggcgccggccggctgctgggcgtgccagctgttggtttgtcgcctcctccagggcgcgagaatctggcgtgatgaactccctcctgtgtagtactacaacgattgactgccatctactgtgacagtacggagcatagcacatatactactgtacaaagtatgtctgtatctacctaggactagttaaagggatttaacttttgtttctaagctttgccatcgaaaagttgaacagaaaacatgtactactagaaggagcagcacgtttccttcttaatatacgtatgtccccgccggatacgtttcctaccgtaacgtagatttccaatagaagccttgattaatttgccttgctgttgttgttatgtccgcgtcagggggctcgctatcacctgaacaaatccgttgtcgcccacaattccacgtacgtacgccgtgctagcttttccatgtagtacgatagacctcgccaccctttgatggtcatctccaaaccactcccaaaatacaaataatgaaataatcactcacgcagcatgtcgtccggccgggacgtcgtcgccgtcgtacggccaaagcgcaaagccacaggggcagcgacaaacaaagggtagctagccacgcgaccaatacaaccgccgtggcgccgtcgattcgttttcggggcgcaaaagtctcgacgtgatcaaagctagtagtacgtataaggaaatggagaagatgatggagagatcgacgtcgatatgatgttccctttctcccctcaaggttcttcggtctttttttctgacgctgattcgcattcgcgcacacaccacacacagctcacaatctcacacatccatcgtcggatcagaccaatcaaagaattttttttttagaacaccaatcaaagaattactagtacattcttctaccaggcacgccgctgtgctgtgtccaacgaaacggatcgatcgagatcatcaaaaattaattaacgcagtgaattaattaagctgttcgtcgtcctggaccggggaccttcattcaatttggtggtacgctcgctcactgcgtatatactccatattaattggggtaatcatgggaggggtacatgattaggccattcccaacccaatgactaggatggtgtccataacattaaataagctgctacataggataaaaaatgatgtggcaagtgaataaatgaggaaagagaaggaaaccatgcgagacatgatttctacacaacatccaagacatcatgtgagataagtaacattaaattgaagcatgaaatagtggtgtttgcattggaagagtagtgtctagtactagtttctcgatgatgtgaagtttatggaaattatatctagtgttatgggttggaaatggtcttagggaaggacaaaacgtacgctggcgcggccggccggctgcaatactacgcccacagcgtgcaagcgtacgagtggtctctccagcggcggtacggtacacggtacgcgcgccacgcgcatacgtccgcggcgatcgcagtcgagacaccgaatgcgtccagggcgcaccatcatgcatgcgcgccggcccggccagtgatcatcatgggtcgccaaacagtaccattggtcgctgtccaagctaggtaccacaccgcgcgctagctgctgcttgttaggtatgtacccggccaactcggccaattaagcagatactaaaccaggatggagtggcagttactgctactgatctgtgggcttagagaaatgggacgcacatgtcagtgacaggtacggtttgcagatgatcgatgcccaaacaaaatgagcaaaattagataattcttgcgtcctaaaataagtatatttttcaccatcttaaatataccaatacaaaattaaaagattagaataccttattttattaaatctcaatgcaactacttcctacttttatctactctcgaaacaattatttttttattttcacaaattctagtgcaatgatttctctaaaattgaatttattttggaacaaatgaaaatagttaaaaatgaacctattacaagacggagggagtaaatgtgtggtatagttgatttaatttcagctgcaatattgggtcaacaagtactcactaatgagtaacccgtgtccattccttatactcattggatcgtatagcatgcatatcgaccagcatgtaaataaagaacggataattggtgcactacagcatttgccaacggacaagccgcctaataagcaaaggctgcaagcgccctatcgatggtgcacatacacgtacgagcaaatgcacgccacgcacagcttaactttcctccttttcttttgcaccataggcgcctcctgcctctatctctaaaccagactgacatgactagctagcaagcacgcacgcacgccatatgatagagggtaatactaatcctttgcacgtttgtgtgcatgaggtactagtactgtaagaaaagaatgcgttacccaacccaccactgcaccagtattaaagtctactgagaggcagctgctagtttctgatgggagcgacactatactacacgtagagacaaggtgaataaaggatgatgcataatgacgaggatcaaaggcattcaaagattagattccttgtgattgtgcggacgatggttagggctcaaaaatggcccacaaaagagagcacctagcaaatgagcagatgagatagagggagggaatgaagcgaggagtactgaaacttcaatagttgagcacgtactcgagtggtatgaaagctcagcaccgcgtccactcctttaactgcaatactgtgtatacttctactttacttgctgcattatacggccgggtggtaataagagcacggcaagaaaatctacacaactacgcatatagtccatctctctctcattatgctggatgatcgatggggatccgatgtctacttggttaggcacagaaaagaagatgaagacgcgccgggtgaggaatttttctttgttttgttagaagaagggcgatgtatgtgcagacatcatcctaatcagcaaaggcagtaaaggaattaatggtccagactcctatggatcaatcgatcgatcgcggcttcacgtacgaacgaaccaaaaggtaaaagaggaacaaattaagagagcccatccgaaagaatggcagctcgatcaaaatgtcgttgcatcccgtgccaaatgccatgcagtactactaacgggagattgttctttcaggggagatagggaagattgttactccttttccgcacgcacgctttttaaactactaaatggtacgttttttttaaaaaaatttatatagaaaaattgctttaaaaaatcatattaattcatttttaaagtttaaaatagttaatacttaattaattatgcgctaatgattcaactcgttttacatatctttttaatcttctctatctcctcctcctcaaacacaccaatgtgttggggtcaacagatgcgcaagcaaacagtgggggagactttggattggagccttggaggaagctaggacagccggtagctaggcacaataaatttgctgtgtgtgcagtgtaccgggtcttttgaagaacgatcattggagagcatatatggcaaaaatccctgttcccaggatacacaccagggtgattttattgaacattcatttgcttcagtacatgacgaattgagcgttttacagctacgcatggaagctgttctctgcttcgtgccgaaagtaaactgatcaataaaagacaggctactagtatacaataaagttcctgtgaaatttatcgtcccactctctttcagcacgtataaacgagactgagagtagtactacaaataattgtgtgatttgtgaccaaacggggagaagtgccttcgccaggacggcattagggcgacgagagcctagcggctacgtacatgcgcaaagttattagcaaatgcacacggaccacacgtgcaatattcttgagagtgattggagctaatatctgctccattgctaatatgatctacgtgtccgtctacatgtccgtgtcagctacatggatggaggggagaaaggggtaagtgaagcgagtttgtcacgatttgcacagtgtacctaccgcgtgtgacgttgggcagcgaaagctcagtcgatcgatcgacggacgacgacccatgcgccaatgatagtacttgccgtagtaccaattcaccagggagacgagagtacgagacgcagtctgcatgcatacataatttcgacgacctgcagatcgattaaaggcggccaatgcaagcttggcgtttgtccgcgccggcactgtttgcgttagctgctatagctaggctccgcgtgcggccgtgcagagtatggggtggcatactgctacagtacatgctacgcgctgtgccgcggatcgcgacggcggcatgacgacgcgcgctgtatcaacctcgataaatcgtcgcgattggtaggagagggatcggagggagccaatgcaagcttgccggctgtgcgcgatgatggggtgaaaacagatacggaaattcccgatcgaccgaacgacgttttcgtaatatgggtactgtttctgaccgtactttttcttaatttttaaaatttggtttttcataatttcttttacatcgtattaatatcgatactgagtagtttaaatgataaatatgttccattaccgatcgagtattgtttccgactgttttcagcccgcgcgtgcacccgagccggcggctgttgcggggacggtggcgtttaatgtggatgccacggggacacggggtgcggtgcgccggtgcggtggctggtggtagatcgagctatagcgttagccggaataggagtggagttcgcgggcccacggatcgatcaatcggtgccgccgcgacagcgtcggcagccggcaggccggccggccggcctcgcgtacttcctcctcgtgcgtatggagtcaaatgctccaggtgtttcacagttgcagcgaatacggagcacaactagcttggttcggttcctgcgcgagggtaatttcgcggtcagatcacgccgcgcacgcctacctacctgcacacctacctaccttgcaccattctactcctgcctgtttcccatcaaggccgtgtttagatcaccctcaacttccaattttccatcacataacatctaaaacttttctacacacataaacttttaatttttttccaaactaccaacttttatcaaacttttaacttttttcaggaaccaaacacaatccaagtgcaaagttagtttttttttagggggggggggggctgaaaattccggaagctctgaaaatgggagcatctcaggtacaactgaaaaaaagaatcacgaatctttttcaaggaccaagtaagagcacgagctcgaataaggcggaacacagtgaacgcctctagctgcgatgcatggattgcatgacttcatcaggggtcaaagcaggaatgatgctaccgcgacagttcaaagtgcgggcaaggcttttcgtgacacgacccttctctggccgactggccgtcgaaacccaaccacgacacgcaccacgggagaaacaacagaggaagcttacaaacaaaagtgccatcttatcttggcgaggcgtggcagtagagcgtatcagggctccttcagtccagcaatcaatgtagggcatcatggacataaactcgataacaccaagcgtaccagtacgagaaaaaggaaacagggagaaaggttttgatgccctcagcaacctctaccaacctgtctccacaaaggcacaagaaagccatcaatgagctctcgtcaggaaatggaccttaattgtaacaaagtcagaaattacagaacagggtccacccggaacaacgaatcatcgctaattctgctggcaagtgatcagccataaccataatacgctgatttaagcccgtgacatgagttatacaaatgcatccaagcttatcaaccaagttgcccgtgccagacaaatcaaattctgttgctaaagaaattcatttgatgtgatttggctagcagccaaaaaaaactggaaccgtgtacccggtaaaatctagactccagacagaaccagtacctttccatcatctcaaccattaggagcaatagaactataggagtataccatgcatgacatgttttggactcactatgcatcactctttcataggatcttcaagcaattgaatgtgtataaggaagctaagactgctagtggttccgagatgaaggaacacttcacaaagatgcagctagccacattggcatcccacatgccaacgacagccggcctgcaaatctacaaagcccaacaagttgggccatacaatgggtctttctcctctacaaaacccaacagcatgccaaaataggaataagtccacttcgaatcactttacaagcaactgcatctgcagcatctcagataggagtaggctgcatcactagcccaaaagcttgatccacaggaagggcaccccttcttgctgtttctgaatgacttctgcacacattcagcaccgaaaataaggtagtaacacttttcgatcacaacctaaagggtatgtttttagattcaatatgatgaccaagtttataagaaatggagcaagattattcacatttttctgtcggttgtggccgacaccacatttcactattccttcatctcctggaaggtgtcacagggtggagatgacatctcacagaattatctttccttatataattctataagcagaccagaaatttattccaatcaatctttctttgatcttggcttgtttgatccattgaccacctcaatattttagcctcatcctgtaagtccaccatcttcctcctcaagcaaaccttggcaggggctagccattccggggtcgcaaaaggaaacgaacttcgttgcagcctctaccgtctgttaattaagagacggacaaactattctcttctgggaagatagctggttgcaagagggttgcattcggtccattgctccgaacatctatgataaaattccaccacgcgtgcgctggcgtcgaacggtggttgaggcactaacaggtcgccaatggatcaaagacatccgaggagcacttgggatctagcctattctagaatatctaaagctttggtcgcttgtccaaatggtggatcttgatcctactactcctgattcaatcatctggaaatgggagagttcgggccaatacagctcaaaatccgcctataaggccttgttttctggtcgtgtcaccttcctttccaccccaatttggaagtcgctcgctccgcctcgatgctgcttcttcttgtggttggtcgcaattaacagatgctggaccgctgaccgtctgcgcagtcgagggttgccacacccggatcgctgtgttctttgcgatcagtacgaggaaagcattgatcacatcttggtagcatgccctgaatcgagacaattatggtggtggacgcttcaggcaataaggagtccgaactgcttacttgtcaatgagccatccttccacaattggctttgtgagagccgaatgaagattggggagcggcatcgtcgaggcttcgacaccgtcgtgacactgatggcttggacaatttggaaagaacggaacaaccaaatcttcaatcaacaacaaaggtcttggaccgaagtggcgaaagcaatggcggaggaggccatgctttggaagtcggctaatcacgggatccccgctgtttggcctttacgaggtcgtggtagccaaatttagtgcgagatattcctatagttttccatagcgtcctgtatcggtcccctgcttgttttccttttatccttgtaaataacttttatttctcttaatggaaaaaatgcgctccttgcgtattcccgaaaaaaaaagtccaccatctttctttgagcattgcccaacgaaacagatccctaccacatctaaccaaacttttaactgcaaatggattaggacttaggagaaaccgtgtcttcatcagtcccgtaagcaactaagcatatcatattttttgtatccttatgcattaccttgtctcattgtagagatccaccatgctgtttgcctgctgcaactcctgtgcaaggtgtataccactaaatgcaaaccatcttcaacctgtttcactatgacaccttccataaagatctgcagtaacatttaaaaacaataagattgcaacacaactcattaagaaatattcttctttgatccaaacaatttataaatcaagctaacatgacctcttcaggacttacatgaccgtgtgtccctctttagaacttacacaggtgatgattgctcgtatatattttactaagcaacccaacatgtatattgtgcattactaactttagattttctaaaaattcagcacatattatcacgctaacaatgtgaagaactactgtgtagatattattttttgctaaacgaacaagataaatttgggtgataggcagattcaagtgcaacaaaaggggcaagcgctttcaaggttttcgttcattcaacagaaagtgtgtttcacaaactgcaagtgccaataaccagtttttttttttttgccagttctttgcccaggctaactttttactcaggctgactgaggaacctagatacactataatatgactgggaattcgccagaaacttggtagcatcataaaaaaaccagctgtagtagtcacatgcttaggaatatgctttttgggaggcttattgccttattccttcatattctacgttgattaccgctggcagaattctgagcaaggactactgcttctgtgaacagaaacaacatagtacaaatctatcacaagctgttcaaatgaaacacttggtaaatgtttgaagacttgtggttttttggagtaaaggaaacatagaagtatagctagccttctcccaaggcttgttaaccagaccaagggtctcattattagcactctgctgctgttttagatcattaatttactcccaagggaacagtactccaacttatggacttctagctattccaaaagtttttgatttctgcattgaagtatagcaaaaccaagccgtcaacaaaaaagaatagtgtgaaatctacaagttcaacagcatattgaaaggaagtaatgcgacttaagtacacaaaaggcacaaaagaaacatcaagatgagccctatgaagctagatacttcatttgtttaaaggagagcaaaattcaagtatacaacgcggaaccggtgttctcgtgcatttctctggagagaagcaggccttgtgggccatctctaaaacgctggttcgaggtagtccgcgtatgatcctacctctaactcgaaaaggctcgagatgccctctagagagtgtcgcgttaatgcaactttaccatactgctggaattaagggcaaacagtgcatgagcaggagacttactgtttattgcgtgcagagaacactagaatatcagtatggcaaagtattgtcaagggtattaatatgccctttggcagttgacacatttcactaataccctttagcaagaataaaagtgcatttaatgatcaggcatctcttttgcaaatctatgatgtagtttgagcatcctttggcaggctagtgaaaagtaacaaaataactctccatttgaaagagtgcagcaatcatacaagccgaaaactgcatgattgctaggaaaaaagtacagtttattttgctgtgtcataaacaagagtgatctggtaacctcagtaaatggcggcaatatggcatttggcatatcacaattgttctctcccaagttccggtctattctctttataaatggaagtgagtataaattagtttatacttatatgaaaaacatcaatactctttagtcagcttattagcagcagaaggtgagttgtggcataacagatcatacttgattcaccataattttccctagcagaaataatgaacatgtctttcgaattatctcccatctaactcagaatttttttgaggattaatattatttttatgaaaaatcgcaaaagtagtggccaaccggggaaaatcgcgaaagtaggtccctgtcgaacgggtgcaattcgatagggcacctatcgaacgacgggcagtcgacagagccctgtcgaacggctggcgttcgacacgcttgcctgtcgaacggagggagttcgacagggcccaccaccccgcgccgccaggcctgtcgaaccgggggcgttcgacaggtccctccaccgaccctgtcaaacaatgggcgttcgacaggccggtttaaagccccgtctccccagcccgcgatgcttgttcgatttatttgaggaccacatcgccagccgccgtcgagagtcgccacatcgtcgccgtgagcgccggagggagcgaggggaggggatagcaggccggagaggaggcgccggccgggaggaaagggttggcgacgccctccagcagtgaagttaaggtatacattagtaatccctaagtacaatgcatatgaaagtttaataaaaaattggtttaagagttgttaattgtttcgcattgttcgatgttagtatgtatggttagcacatgttagtatgtggaactagttcagtatttataaatgatgtgcaactggttcattatttctaacaaatgtgcatcttgttaaatactcttaataaatgtgcaactggttaaataattttaattgccttgattatttgtggaacaggcggaatttgttgagcacgttcacgtggagtccgacaccctgctgcaaagactagaggcgagacctccaggtctgacgacgtggcgagtgtccttcgcaacttccgtgcacgtgctgccgcactactacgtcgtgtctcctgtcggagcgcggcagatgtggtgcagacgtcgggccgacggccatcaccaccactaccccgacgttccagcgtggatcggagtggtccatcctcttcacgtcgcgggtacgaagcggcccacacatctcacagtcgtccttcctttcagcacaccccagcaccggagtacaccagggggtcagccggatcaggggtacccacgtcgagcacggcaccaccacgtccgcaggtattccaaactccgccttatgttcacccctcgcagggagcatctgggtcggcacacttcccttacatgccaacgggggacaacgtgttgaacacaccagcatggggacttcatatcactccgcgtgcgccagagcagggccacacacagcacacatgtaagtcattttaaacaataacacgctttagtttctaattatatgtatcgttactaactacgccatattttttggtttctccctcttgtacaaacagacgatgagtacggttcggcgtcgacgcatcacggagtgcctgcttactcccctcgcacagcattcattgaggacttcttttccactgatcctccccagggggaagtagggatggattactggcacgcagcacctcaggtcacacagccgacgcaggagacggaggccggtcaggggccagacgtgacaccacagcaggcagctagagataggcacccccctgataatttgacatatcccactgagcagattaggcgtagtaagaagggaggacctagcaagcgtgcgaagggcactgatcgtccttgacttatctatttgtattaaacttttagtcatttatgttctgtccgtactatttgagaaacactttacgattaacttagtactatcagtactatttcataaacttcttcggataattactcagtagcatacccttcgaatgaatcatgacaaattatcattcaaatatacaaataatgaaactaaataattcaaatattttaaccaacaaataaatactacaatttctgaccaaacattatcaaaaccctaaatcacatacatataacattacaaaaatattttcctttcttacacactaaaataaattacatattattaaaaaaataacttattacaaataaatggagaacgcgaccctgtcgaactgcggcagttcgacggacatcctgtcgaactgcggcagttcgacagcccagcctgtcgaacgggggctgttcgacagccctgcctgtcgaacgggggctgttcgacaggtcctgtcgaacggcagccttccgatctcgtcgccagtcgcgctctggccgttcgataggcgccctatcgaactgcatccgttcgacagggacctattttcgcgattttccccggttgaccactacttttgcgattttccataaaaataatattaattctcaaaaaaattctctaactcacagcatgcactccctctgtatattcgttgtggcatgtacttatattttgggatgacatgctagattggccatattcgtcagtttccctgaattcttgattgccgttgataatatcctctaggaagcatattactctactgattctgagttttaagcaagatcaagtagtcctaattattcccataatcttgcagctgcttgacatcttagaatgatactatctgttgtttctcgtgctgggcataaatcaccgtggggattctcatcccattttttccttgccatattggccttagcattcggtctctgaaaaccaactagaggaatatacaacaagggcaagctctcccttcaaactatgaagtgatgagtagaataactgatgctaagaagctccaatggattcacgaactatcacaaggcaattgactcaagctaaccagaataccagatgcaaaatccaaacaaaattgaagtcacaaacttgaacatttgaacgcatcaacacatatatgcacttcatcctacttgtttcacccagaaatcaagcgagaaggaactactaaattccgaacgagggtgtaccttcttttcgtcggagcgcgggggaggcacggaccgattggtggctgccaccgcagccggcgaggcggcgccggtgcaacagagctggagcgctgccgctccgggtcaggatcatcagtgccctccatgatacgaaccctaaccacccctcccaatgcgcccaaaccaccgtaccaatccctcctccggcgaggcgaaggggaaaggcaccaacccccagcctaatccccggattgcgatttgaggtagcaagccgaggaggtgggagaatttgggggcatttaactatttgcggtggttttggctgcgcctgcgagaggtgggaaaaaaaagttggcatggatccaattaacccttgttatagccaacaccaaaaggaaaagcacgtgctcgtgtcaaaccgcagccgctctcgcgcaccgcaccagctcgggagcccggtcatcacctactccgcccgccgccaccatctacaagtacccaaacactgtgccgcacgtccgacgccgcagtcttgtagtctcgtgcaccaatcgtcgcgccgcggcgacgttaggcatttcgtcgaacacctagagcgcagccatgatgctcaccaagccccacccttcgtccaacctcctcctccccaccaccacagcgctcccaaatcctagcccaaaccctagccgcgtcacgcccctggcttccggccgtggccgccgcggccaccaccgcgtgtgcgcctcctccgtggcgcccgcgcagcccgcgtcggtggcccagcccacggcaccggcgctgagccgcgtggacgtgctctcggaggcgctcccgttcatccagcggttcaggggcaagacggtggtggtgaagtacggcggcgcggcgatgaagtcgcccgagctgcagtcgtcggtgatccgcgacctggtcctcctctcctgcgtcggcctccgccccgtgctcgtgcacggcgggggcccggagatcaactcgtggctggggcgcgtcggcgtcgagccgcagttccggaacggcctccgcgtcacggacgcgctcaccatggaggtcgtggagatggtgctcgtcggcaaggtcaacaagcagctcgtctccctcatcagcgtcgccggcgccaccgccgtcggcctctgcggcaaggacgcgcgcctcctcaccgcgcgcccttcccccgacgccgccgcactcggcttcgttggcgaggtgacgcgcgtcaacccgtccgtcctccaccccatcatcgagtccggccacatcccggtcatcgcgaccgtggccgccgacgagaccgggcaggcctacaacatcaacgccgacaccgcggccggcgagatcgccgccgcgttgggcgcggagaagctgctgctgctcaccgacgtgtccgggatactcgccgaccgcaatgaccccgggagccttgtgaaggagatcgacatcgccggggtgcggcagatggtggccgacgggaaggtgggcggtgggatgatccccaaggtggagtgctgcgtccgcgcgctggcgcagggcgtgcacaccgcgagtatcatcgacggccgcgtcccgcactcgctgctgctggagatcctcaccgacgagggcaccggcaccatgatcactggctgaatttctgaatttctgggcaggcaataagcatggttaattcaattcttcgttgtttttggcatctttttttgggggattggttgttcgaacttggaattgatcttggaaccagatggttttgcaccctttggatgtaacagaaatgtgatcttgaatctcattgctatgagaaacgtcgatgaaaagggaaaacagaattcaattttgtgagtgcacaatcaatcttggtgcagatttattcggatgaaaagttacagtgtcaattcaaacttccaaacataagcgcatatgctttgtttggtgcgatttgacctaaggttggtgggtgcttgtggatttgttgctcgacattcttagcgtggacggggaaggtagcttcagagattgggcttgacaaccacggtcaacttgctgctgcaaggcggcaacgcgacgggcgagttccaacccatcgtccaagcaagcggaactatttatctattcttaagtatattaatctcccagtgaaaatgggacacagacaaaccaatcctttacaacagactaacagggtcaaatgatacagaaatcatcgatgtacaatttcgtgtgaatttaagttagatagcttggaaatcatgagctgtcctacaaaacatgcacacacggcttgcagaatcttgcatcaccacactttgaaatcccacggctcaaaactgtgttcaaaagcaccaggaaatttaatgagataagactgaagggaagcttaaatattgagatttactatgataaaatcatgattccaacacaggcaattaaacttctgagcctgacaaactaggattggcatcaatgttggctaaactaagatgaatagaggtgctcctgcgcatagctaagagaccacaaaacaacgaaatgtaaagtcgacggattgttgtgctcacttgatacgagcaatggccaccacgatgaagatgaaaactgagagcatgaatgacaccttcactgcatcagtgtaaaggtcgggcttcgcttcatcatcatcagagtggaaaagcatgttcacaatcttcattatattattcatgaattccattatttttgcttgggtgttgcccagaatccacttaagcactccagcaggaccaccagggtttccctttctacctgctgcttctttgtctgaaagatgggtagattacaatgaacagctaggaagtaaaggcataaatcagtagaatttgtaagtatttgcatgttttgcagtactaaggtgaaaaggatcatcaaaatgatgctgtattgctgtgacaagttagtctttttggaaaaaagagaaggccaaatagtattgcttatgaccagcaaatctaaacatgaaaattttagtgtaacataccatcctggaaagatctcctgaattcttgcactgcctcgttgttcataacagcatcccatacagccctgtcgcatgacaaggacatgaccattttctgcattgaagacaaggttagcagagtcagtgcagagacgaattgttcatgaacttctatgtcagaacttcggacagaagccagcaaaagtacatcaaaagttgaaaggactatgtaaaatgacatgttccaattgagaataaatgatacaaagtaataaacattctggagcacctgaagattgttaggtctcattcaggtgaacattaggatcttttttgcaatagatggagcaaaagttgaaaggactatgtaaatgacatgtcccaatagataatgatataacataataaattgttacagagcacatcagaattggttatatctttctcacctgaacattaggatctttttgcaataaactgatataacataataaattgttacagcgcacatcagaattggttatatctttctcacctgaacattaggatctttttgcaataaacggaaggcatccaaaacatttctatgttcccttgtcagaagagcagttgagttgagagcataggcagcaggttcaatccagtcatctgatcctgatgaattgccagatgacgaatgtactgaggtggacaatgctgattgctcctcagtttcataagaatgcgcacgaaaaggatcaccaaataccctgaatgcaaatggtagcctgatcagatggagcaaacaacacagactacatctaaatggctcatgttcagcatagatgattgacagtatattgtatgacagctccatctaaaacaatgttcttcttgtcttcaagattatatgagtacagtacggagattagtttattagtttagatccattttcaacaaaagatagcaaacttgatcttttgtgtagccataagcccatgaatatcatcggttatgacaagaacacagtttgttaggtcgcttctgaataatagaagaaacccaaagtgtataagaaactcagccatgggattggaaaaggctgcaagcaaatcttgaatgttactacttttccagtcataattctgtatgtaactacaggtatatatcttgaattttgataccctcaataggtggatccatgtattgtccaattttaatcctttaaaattccattcagaaatcacctactttctccgtcccaaaatatagctactgaattagacacaacctaccctctatcctgattcgtactaataggttgtgttaactgtgttgccatattttgggacggaggaggtatagtactacagcacatgccatggaacagtccaaattttcaagaaacgtatgccctttaacgaactcatgattgttcattcatgaactctgcacggcaagtgttccaaggtccgttggcatctgtccgtgcagatcacggaagtacacgatgcttccccaggctcacatccaattatggaggagaaaccaaaccaaccaattgcaaacattgaacagcacacgacaaagaccatcacaacctgccactggagcacggatttgaacactaataacgacaaacaacagattttcgctgactttctcgcatcaaaccatattaccaatacggttccaatctaaatcaatcaattcgatcaaaactaactgacataatcattcacagcaacctgatttaggcgaggatttaagcgagaggcaaacgaatcttactcctcgatgctggtgaaggctgcgcggacctcgtcgccggtgggcggcgaccagaacaccaccctgtactcctcctcctcctccgcaacaggcacgggggccccatgaaccgcctcctcggccccggcgacgacctcctcccactcctcctccccctcgcggcgcatcgtgcgggactcccagcacgcggccgcggcgatggcggagggcgggggcggcgaggtggcgcgcaggaggcggccgccggagcgggtgcgcgggcggccaccggatgaggaggaggcggcgacgggggacgtggcggaggtcgaggcgccccctccgccgccgccgctgccgagcgccgacgaggagcgcacggcgcgggtggcgacgcggaggaggtgcctcccgggcgggttccgcatggcggcggccggcgaggcgaagcttatcgtcgaggccgcctcggctcggcgctaatccaatctgctcttcttccccttgtttttctgactgctgcggcttgtgatgatgtggtggagataataaatttttgaaggcttttgactgggataggaagggtagttgcaatatctggatggaggtggagtattgcttggggtcacccacaattcctaccttgttgtagctcctcgtttggtttcttgtggaattggagcatgcctattggttgctttatttgtctactcttctactacttttatatgataaacatgtgacaaatatatataactttttagaagtattttcattattttcttatggaagagtagtatgacattgttaagaaaaaacaattcatttacaagtcgataactaagagattatttgagagaaggagaaaggagaatattgaaaagatacctaaaacgagatgagtcattgttgtataatcaattaagtattaattatttaaatttaaaaataaattaatatgatattttaacatttgggaagcgtgtgcgcggagaacgagagaaatctcctctctttctccattgatcaaaaatttttgttgatgaggaaactctcatcaaatagtaatctcataaagagtttgctcggttatgttttaccatgtccgcaatgcagttgcaatcgacaactacaattaccgacgtcaacaaatgaatttcaatacttggttgttgtagctgctataatggttttattgtaaatcgcataactaaactggattaaagatgatacatagatgcggtgagcgtaataagaaaaagaactgcacataatgctcttctctctctcatcacgcatacagagaaaccctccccaatattttctcctttattcaagagcatttttccacatagtgtttaaaaggtaaactcaaatgatatttataaaaaaagtatatcccagtagcatattttattcgtccactcgtttttggggtgaggaaaaaaaatcttgtattgtgctcgtcattgaaaatacgaaacagaaaaaaaaatcacctactcgaaattaattaaaatcttcttgtttggttccacgcattcagcttacgtggagcaaccattttccatgcccttggctcttcgttgcaccatgcttgatgcttcctggtcatagggtagaattcatccacgtcgctttgcaggcttgctgcacctgactgctacgtgcacccggagtactactcataaaacaggatttgtcagacacaggcacacagcgaacctaaacgacggaccttttcaggccccacccacgtgccattgctttcacggatcagatactctccgcgtctccacgacgagcagaaagcaccaactaatcagctacagcgtgcgcaaatctcaaactagcaccacgctaatttaaccttctcagtcgatttatcattacaaaaacatgcgcaaaaccaatcaaatttacgcacgggatcgatacgagacttggttcttgcttgtgacgaactcagaacgacgccagctagcggcctagcgcgcgtggctgctgtcttcacgccaccatgcaccgcgcctgtatcgaaaccgtaacgcgaccagctgacacgtacgcgtacgcgcggggagcgggacgtgcggcgccgaaaccgcagccagccatgcccgaggcaattggatagcgtgcgacgatcgagaagagagggtgcggcggctcgacgaggaaggtagcgtacgtgcgtagaacaacaacgtctgatcgatgcatggatgggtgctcgcgaaggttcgatcggcgcgttcgccgagacggtatatatcctggcacgagccgagaaacaatttttcagttggaggaagttggaagcgatggaacaacggcgagatggatggaagtgaaccggtttgtgattactacctttgggcatgatcaggaatatttcaatgcctgatcctgataaatggaaatatccagtcctgaaaagtaaattcaaaaacaacggccggtccgcagtcgccatgtctctagtaccatggacgaactagtttattcttagagtaaattgcgccagcggtacaaaaactagtaggtgggtgcgatttaatgtaaaaaattgtaaaataagcaaactgatacataaacttaacaatcatgtgcattttgataaaaacacggttacatacctatggttcatcgtattttattggttgtatttgtaaacatgactgctagattaattgttggcaatgagtatgttttacagtgctcatcaccgaatttgtatgatcatatggatcgctcggaaattttgttagttggcatgcacttagttttgataatcattatttttctaattttaaataataggttattttagtattgtaaccaagcaaatgcaatacatctaaaaccttattcggaactcaagatgacctaagtggctgctttttctttacatagctaaaaaagtatggtgtggaagagagatattttaacaaaaaatgcaggcactaaccaagttgttacatctatataatcatttttcaaattcttgcactagatcgtacctacctaccacgcaatttactcttattattacaagcatgagctcatgagcaataaccttggctaataaattggtaacgcgatgaaaaagtcatccaagaaacagaagtcatcgaacacgatcatgatagggattagtaaggaatgtttaatttggtgcgatcgaaaacgtcttgtgtgaaaggtcctccttcaactgcagaagaggttcgcaaatgtattgctgatcgaccataaatggattaatgaaccaggaaacatgaatatctaatctactaatatgatcctttccttgagtgggcctcgaacatatgatcctttgagagttgagtgggcctcgaactgaggggctatgaaggttgtgccattcaacatcgcggcccaagtatcattcatttttctgccatgccaggacaacaaattttgatcaaacgaaaatatttcaaacttaggattggttggggtgcgccatgcctaagcagcagtgcaacgctagggcgacacgcgagagccccagcagcaagctactgtggtgggccctcccccacaaaaaataaatttaatatcaaagtggacacatggcccacatatcagatattaaactgataagaacagatactacacttgatcttagcaaaaaggccgagaaaggtatgagtagctacgttgccttgcccatcgttttataccagcctccgccttatcctccactctcgccaggcgaggtggtactaatctcgcattggcttctcctactctgcgtcgatctaatgggcctcctgcttcgaccggcccatttaacttgtccaggcacgatcggccgcccacgtggcccttggcggtcggaactgcacgaatcgcgacgcgagatcggacgggtgtggctggctcgggagatgtggaacggggcttgttgacttgtccggcccggattgacgccgggagcgaatcgacgacgactgagctgctggatttttttttcgccccactaatccggccctgataccgtgtagcacgacggccaccggggaggtcgccgccgatgagccccaccatgagccttctctcgtcgtcctcatcctcgttcttccgccgcaactgccgctcatctgctcgccagttccgtcagctggtacggactctcctgatctcgcgattagtttatctgtagcttttgttcgtcgttagctgtttttttatgtttgttactggacggttcgtggtgtcttcaggggcggtgctaaagcgtaaaggaggatgttgccacttgcttaatttattctattttagatcgagtttaagctcatatgggtgtctaagtttatattaagacgagtgcatacatgatgaaaatagatgatatatagcttaaaaaaattttttgaccggttcctgaacacctccctatatatactagctccgccctcccccgctttggtcgttggggttgggtgtaagagacagtagcgtcggtccctgtggccctgtgggcgcgtagattgagttagctgcgtggaatggtgtatggtaaacactactcctacctgtttggattttaggatttgcttaggaatttttgtttggattttctgaggttatcagtccttggactccttaccagcgtgcactacatcagtttcttcgaattgcgtccagctagctaggggtaggatgagcaatggtacgtactatgtacctgaaaaccaaggtgatacttgagtgaaatctatagtttttgtgtgaacattgtagcttgagatcgagcaacccattgtttcacttaattgtttgttagcaaataaagattatttataagtaaaacttttatatatgtgtttttaggcgacgagtaggtgtggatggttgcggaagtgctgaggcgttgcctccaaggtagcccaacaagattgacacggaagactaagtgtgtcattctattcttttaatatattgacgtgtaatacttttacgtgttcgagaaaaaaactaagtgtgtcacttcatttcgtcctcgtgacccgtaaaagaaaagcaaatgaagtaaaataaactatgattaagaaaacaaatggaaacttactccaagttgtaacatttaaattttaaattataagtataagtcaaataatgactgagacctcgaatgagtagtttatgttaatgaccatgctacaaaagttgactcttgctctgtttgcgtagctgagcttgtgaactgtctcagttcgatacacgattgataggcctagtctagtattgttgctttccactgcctgtaaatgaaaaggctcaataactgccgcttgtttagttggtgaaaagaaaatatttagttgtcacatcggacgtttgaccggatgtcggaaggggttttcggacacgaatgaaaaatctaatttcataactcacctgtaaaccgtgagacgaatcttttgagcctattaaaccgtcgttagcacaggtgggttactgttacacttatggctaatcatggactaattaggctcaaaagattcgtctcgcgatttccatacaaactgtgcaattaatttgtttttatctatatttaatactttatatatatgtccaaatatttgatatgatgtttttgggaaaaaaaatttgagaactaaactgggcctaatgggctttccccgacgccctgacggaaagggcaaaaacgtcttcggaatacagatgagatattactgcacgtttgcatgtttcagtgattcacctacatctctactgatccttttacagattattcatgttacaagtatgcacattttattccttcagccccaacaccacgcccttgcgatagaacggacgggcagcgagagggattagtaaagaataacacagtcaagaaacaggagtcatcgaataacagccatgcaggttcggaactggattgatcgaccagaaaaggttcggaaacggattaatcgaccaaaaggttcggaaacggaaatggactaatcgaccaggaaaaatgcccccgtccatccggtgattatactgatatactaatttgatatactaattttcagcccaggcagcaattcagcattgcgctgcggtaggcaagttgaaaaaaatatttataacaaatgaaaatctataaaactaaatgagcagatcaaaatctttgaaacgtggattggttggggtgcgccgggcccaagcagtagtgcaacgctagggcgacacgcgagagccccgatagcaagctaccgtggtgggccttcccccacaaaaaataaatttaatatcaaagtgaacacatagcccacatatcagatattaaactgataagaacagatactacacttgatcttagccaaaaggccgagaaaggtatgagttgctacgttgccttgcccatcgttttatagcatcctctgcctcatcctccactctcgccaggcgaggtggtactaatttgcattggcctctcctactcggtgtcgatataatgggcctcctgcttcgaccggcccattaatcctgtccaggcacgagcgcactacggcccatggcggtcggatctgcatgaatcgcgacgccagatcggacgggtgtggctggctcgggagatgtggaaggagggcttgttgacttgtccagctcggatggacgagtgagctggtgaactaattttcccccacacatccggcccttacgccacagcacgacggccggcggccgccggggagatcgccgccgatgagccccaccgcgccgtcgcgtacgtaccctgtttgtattctccgcggttatcagtccttacaactccttaccagccttttctatattagtttcttcgaattgcatctagttaggagtaagatgagcaatttgtacctggaaaccaaggtgatacttgagtgaaatctatagtctttgtatgaacattgttacttgagatcgaatgagtaatttatgttaatgaccatcttatgccatcagctacaaaagttcactatttctgaagcgagttctacccttcctctcgcgtcgccctcccccagaggtggcacgggaggcgtcaatctccggccgcccctcccccccatcttcctcctccgcctcgccgccgcctgagcggccgccggcaaagccgcgcggccgcaaggacggcggcggcggggctcctcattttctcgtcaacctcatctcgtccgggcggccgggggagcaacccagggcagtggcgacggtgaccgccagatccgcgccgcctcggccggatctggcggggtggcggctggcggcagggatggagacggcggcgggaagaaattgtggtacgtaggttatgtgtctgtcttatgtcgtcctagtgatttatcatcggaatagctcagttcgagagagggggtggaattttaaattcgaattgtaaggtttgacagccaaaaggcgatggtgtcggcagagacgcggctgggtcgacggcggcggggatggcgacggcggcagaggcgctggatccggccacgctgaaggcagatctagccacccggcggccggatcgagctagctcgtggcgggggcagcggagctcgcgacaacgtggcgatgacagcagggcaagcttgtggcaggggcacccgtcgcggcggcagcggcggcgacatccgtcggcaggagcttctggaggtggtgctgccggcggcggtggctgccgacggcgcccgcgatctgcaacgtccacggcggctctcggccggatctgggtgcggtcggtggtggtcggctggcgacgcctgttggcgacagcggcggcggtgtggtcgcggcagttggcggcggcggttgctggctgcttggtggtggagggcgacggcgcaacgacggtttgcggaggcggtggttcgcgtcggtggcagcggcgacggcggccgtgactgtggaggcggtggcaacgttggtggcgcggaaggagtcaggtgcgaggcgaggatggcgacggcgaggtggctgagtgttcgacagcagcggctgcggtggtggtgaccgtggcggtcatcagaggcatggcggcctcagacggcttgccgagggcgtgggagacggttgcatctggccggcgcggcatcgttgggtggaggggtcggagatcagcttggcgcagagaagcgcagccgatggcagcggaggccggctcggcgcgagaggcgcgggcggtggagatggaggccggcttggcgcaggcggcggagatggaggccggcttggcgcgagaggcgcagccgatggagggaggccggattggcgcgaggcgcatccggtggaggaggccggcttggtgcagagaggcgcgaccggcggtggaggaggcgacctaggtgcgaggaggagctgccggtgggtgtggagcggactccggcgcacgaaggttggccggcggggggcgccggtgcaggggtcccacatgtcggcagagctagtgtggtggtggagctttgttgatctagtggcggtcagtcacgcttagcggcggctggtctggtgctagccttctcctgggcttgtgtgttggcgatattggtgtgtgggtgatggttaattttttttcctggctacgaccctcgtaatctcgttttttttttctgctatatcaatagaactttgcaccgtctcgtgcgagacgttcaacaaagtttgtgcgctgtgctatagtgctatcagttagatgcacgattggtagcgtgcaaaaattgttgctttcccccgatacctgtaaatgaagagggtcaataactaatgggctctcccccgagaccctgactgaaaggtcaaaaaacgccttcagaattcatatgagtactacttatcactgcgtgtttgcatttttgagcggaattgctacctaaacaggtaatgagtggcgtgtgtaaagagagcagatacatcaaaatcttaacaccgacatttatctactgatccttatacaaattattcatgttattacaagtatgcacatttattcttcagctccaacactgaaacgtctcggctgctccctttgcgataaaatgaacgggcagtcggggtctcgacaggtaaattttacagcaaacgaaaacgaattcactgggtttttacgttttacgaggcgctaagccggagagattcgaaggagtgctcgagctgagccgtcccgccggccgcctgccggagcagattcttcaccgactccacccagtcctgcttctgcgccctgctctcgcactggaactcgaccacgccctgcgccgtcctcagcccgaactggcacttctccgacgacgccgtctccggagcaggaggcacggcgccgccgccgcacgcgtgcggcgccggccacgcctgcacgtcgtcgtcgacgccgtacacgacgctcttcttcttcttggagaaggcgccgccgatgtgcttgctcttcagtttcacgatcacctgcgacttcttgttgatgtagacggccacgcgcttccggtgcaaagcgcctgatgagaaaattgaaaaaatcaccatcccaagatcgagctcagtttgggcgcgcggcgacgtgacgacgttgtgacgtgcgtccgtgtcaaggagaggctttttttgagctttacctttccggctgcgtttcaggagcgtcccttccttgcaccatatgtcgccgcggcagctgccggtcttctcgtagggcgccaccgccgccaccttgctcctcgcctcccgctgcgctctcagcctcagcgccgtcgctcctctcagagctgccatgttgcgagagaactcgaagatgatttagttgcttcggggttggcatgcgtggcaggagctagagaaggcctgtcgtgatgcatggttgctcacctgtggctgcggaggcggtcagggtcatgagatcgccggggctccgcacgtcgacggcggcctccaccgcggaggcgacctggtcgtggtcggcgccggcgagctcggcgatctcgatgcagtgcgaggccagcagctgtgtggcggacgccagcgcggcgtccatcttggcgtcgtcgaggtcgtccgggtcgttcgccgcgccggaggccacggccgcgacggcggccgccacgctcgccacggtgaccgcggcgtgcacgcgcgcccgctcggcgcgggccttgtcgaccctgctgctgctgctgctgctgctcccgtccctgtggtggaaccacctcccgatcgtgtgctggtgcgcggagatggcgctcctgcacctggaatactgcacgcagaaacacgaactccggatcagatcatctcgcaaaaaaacctctcgcactctccatccaatcgcggatgatcttacgcgtttgcgggggctcaggtttgtgctggaggcggcggcgagcgcgagcgtctccggcatgagcatcccggagaggcgatccaccacgaagttggtgctccgcctcgcgccgacgccgccggtgagcaccctggatatgtccgacgcggacacgctccacgaccgggacaggaactccatgggctccatcagcgtctgcaccgccgccgccaccgccgccggaggaggagcagcatccatgagcagcaggtgatccctcctcctcatcctccccaacatgtgcccttccatcctcacttcccctgcgatttttctcacacacgcactggcacgctgcagtgttcaaaactgtcacttccaatgcctcgccatcgctggctacttatcatggggtcagccgagctgtgtcgatcgaagggcacacgaagcacgggaaagagggtgcgtgggcggcaggagacaccaaggcttcggtgactgacggagctgccgcccgtgtcgtcgctttgccgcgcgggggcgacacgtagcaacagtgccacttgccggcgggtggccattgccggcctcgtacgttgcatcgtagatatcagatggggccggggccccgtgtaggagacaggcgcgtcggggcgctaggtgtataaaaaagagcgtgcatgcacctcggactcgtgagcctgccagtgtacattctctgctatagttttatggggtttgttcgtttccatgcggagggcggtggaggactgtggccacgccgagtttgtcggagaaaacggacactggtcacttggtcagcaatcgtgtgggacaatggtgccaaagtggagtggaggatactgcagccatcgtcgaggagatcgggatcgacaatccccttgccgtcgacaatcgcgcgaagccacagccttttttttctcggcagtcgtcaccaccgctcccctccttcgatccgacctccgtcgtccctcgcctctggtgaacaaggcaacggcgacggcgtcggcgtcctcaacctgatgcgaccgtatgctgcttgctacctctgtagtctgaacacgtagatgggttggaaattgaggcccatcaaaatgaggcctacatgacggttatcacacaccgaagaccaaactctggacctctgcaccacagcacgctgagcattaattagtctggccggtacacggcctatttcttgaagtccgcgctgatgaaatgaatttacggctgcgcaatggccaaagagcaattctacggttttttaaaggtaccattacagtatgtagatactaagagttactattaaatttataacagaaaaaatagtaaaccgtaaaattactcatggccaaatgtttgcgcacggttcctgtaggcagttcctgcgcttaattgtcatccatccagtcacaatctgtgcccgttgcgccttgggattgcacgtcggtgtctctatatatggtcccgttagcctgcatccgctaaagataagattaagcacgacatataaaacgagagtgttattagcacatgattaattgagttttaattattttaaatttttaagaaagatttatctgatgtttgaaagttaccttacacataagtttcatacgaaatatatcgtttagtagtttgaaaacatgttaacggaaacaagttaaaactagcatggtggcccgcgcagattgcacagctagcatcattatattttctcttatataatatcatatatgttttctcattatattattcaaatatattaaaatgacatcataattttaaattttgtaataactttatgaaactactaatgtgtaatattcatattgtattttatatacgtgttagttattaattatttttaatatcaaattttagttatttgtaaattatatatatttctatgtgacggagcgtggggctcctcaccgggagaccgcgcaggcccccctttgccggttcggccggggaccctgggtgagactctaagctcccaatctgtatgtggaaggttcgcgagacaggaagcacagaagacgccggcgatgtatacaggttcgggccgcttagaagcgtaataccctactcctgtgttttggtggattcgtgtgtgaaagagctacaaagtatgagccagcctctcccttgttctgggttcctaatctggaaaggttcagtccaagaaaaagaaaaaccccctctctcggtgggcaaggtcctccttttatatcttaagaggataccacatgcaccatttccctcttttttgtggggacctcccccaccttttcataaatggacggagatttgtatagttgccatccgagtcaccttctgatgggacggcccacaactacccccactttcgccgggagcagatgcgacgtggaatcgtggccgcctgctgacgacatgaccggagtcagaccagtcacgtcggtcattcttgtccaccacgtgtcagcttagcaatctacatgtccgcccttcttcacacaacatcttgcttgtaatggttaggatgaagcctggcatatatctgatcagggctaacgtgccatctctgggaggtaacacgctagctccagctggggacgagcgcctagaagccctcgtcctgacgggatggggtgaggcgtgtgtcagatcgcctgtggccacctaacccgcgatctgaccggtctgtgactacacggcagtccgcgaggtcatgaagggaagtgttgtggacggtgcaccacttgccggttgggcgctccctgctgggagcgccggcctctttctttttgtcacccgcaggcctcccctttcgggtggcccgcggagcgccctcgacggcgaggacatgaccctcgtcgtcggtatgggctgacctcttcttcctcctcctatcacgccgccctgtctgagcggcggatccgggggcggccgaagctgccacaccggaaccggaggggttccaggtccatgcctcctccttacgagccactcggtccgcgagctgaaaaagctccgcggtagtctggggctctttggaggcgatcttttcgagcatgcggttgtgccgcacaccccccctgaacgcgtaaatcaccgcgtgtgcagggatgcatggtatggtattacggacttgacagaaccgctgaatgtacgagcgaagtgactcatcatcccttcgctgtactgcgtgcaagtccgcttcctcaccggggcgcggatatgtgccttggaagttcatggtgaactgttggcacaaatcctcccaagagtggacagacgcgggtggcaagttcattagccaaccccgcgcctgtcctttcagggccatgggaaagaaattcgccatgaccctgtcgtcacccccggcggcctcgatcccggtcgtgtagacctggagaaactcggcggggttgacgctcccgtcatatttttcggcgatggtgggccggaaccttgggggccaacggacattccgaagactcgccacaaaggctctacagccgacaccaccaaccgggggcacggagggctgattcccgcgtccgtgttgaggtgacactctggacgaggaagcgccctccgttgcgtgggcagcacgtcggtcattacgccggcgctcgatgctggtgcgggcgtccggccccccacgcagatcttcccgggtcgaaggagtcgacgaaggagtggcggccgaatggcgaacagcggctgccgctcgtcgtgccctccgtcttgacgacgcggagccggtggtagcagcaccagaggccttggtggcggaggaccgcccaccagcatctaggcgctgccgtgcagtcatgaccaatttggccacatcgtccagccaacgttgggctggagactccgggtcatggacgacgggcgggtgacgtaggagcgcgcctgcagcttggagcgcgccctggggcgtgctgccgtcgccgtagacgaggaggcgacgctccccatctcgccgcccttctccacctcctgtggatgtcgaagtcgcggatccttcagccctctcgagcgccttctcccgcctaggactttggcgtggagggggcggtggagtacgagctcgacggcgtgggtttggctccccgtcgtcaccgctcatactcggggagaggtcgtgcgcctttgctggctcggccattgggctgaacagaaaaagcttggcgcacacgaaggagtgcgagagctcagaagatcactcgcagagtcccctacctggcgcgccagatgacggagcgtggggctcctcaccgggagaccgcgcaggcccccctttgccggttcggccggggaccctgggtgagactctaagctcccaatctgtatgtggaaggttcgcgagacaggaagcacagaagacgccggcgatgtatacaggttcgggccgcttagaagcgtaataccctactcctgtgttttggtggattcgtgtgtgaaagagctacaaagtatgagccagcctctcccttgttctgggttcctaatctggaaaggttcagtccaagaaaaagaaaaaccccctctctcggtgggcaaggtcctccttttatatcttaagaggataccacatgcaccatttccctcttttttgtggggacctcccccaccttttcataaatggacggagatttgtatagttgccatccgagtcaccttctgatgggacggcccacaactacccccactttcgccgggagcagatgcgacgtggaatcgtggccgcctgctgacgacatgaccggagtcagaccagtcacgtcggtcattcttgtccaccacgtgtcagcttagcaatctacatgtccgcccttcttcacacaacatcttgcttgtaatggttaggatgaagcctggcatatatctgatcagggctaacgtgccatctctgggaggtaacacgctagctccagctggggacgagcgcctagaagccctcgtcctgacgggatggggcgaggcgtgtgtcagatcgcctgtggccacctaacccgcgatctgaccggtctgtgactggtcacagaccggataaacgagtgcactgcactacgttgcatgcggcgtgacacgctcagtcaaaccgcaataaatgtggtaggtgagccccactgtgctcacctaacccatacacgcggagcaaaaaacccacgaggggtcggggcgcctcggccctcggggccgaggggggtgcagcccgaccccctcggggggactaggaggagggcgaacacatcaccctcgggcccgacgtcccccgagggtgccaggccacgtgggcgattgcgtctgcctcaaacctctagtcatgatactcctgatcccatgtcaccgacagtagcccccggcgttatgccagggcgatcgccctctttaagggaagcggtcgggcgtgacgccactcctaaggcctggtgacaggtgggaccggtctccacaattgggcagaaacccaacggtcacaaatcacgcacatcggcagtggtaactcggctgtcaataatgagcggtctcttcaagactgccacattactcgagtagcacacgaatctggacatggcgattcgtttcgtttggagatatggtaacgtcgctttggtcggcgagcgtaattaccgcgcgcacgatatgatctatctcgactgccacaaccgcatatccacctcatgcgccgcaagcgggcgaatgggattagtggaagcatgggcgcgagaaacgagggggcgaaacagtgggcgcgagaagcgaggagccgggcacagcgttggcaagagtataaaggcactgatgaagggatttgtttccctcctttcgccattatttcccttgtcttcgtcgcttgcgccctaactccttctttcctgtgccctaccttcgccacacgcgctcgctcttaatcttctcttccttccggcgccatggcacggggctccgctctgctcgatggtagcgtgctgccgccctcccgcatcgtgagcgagaggcaggctgggctgccgcgccgcttcatgccggaatctgccaccggccgagagatagtcacgctgggcgagggacgcccggcgccagactacccggggcggtccgtcttctttctcccctttgcaatggcagggctggttccgccattttcctctttcttcatggatgttctggagttctacgatctccagatggcgcacctcacccccaacgcggtgatgacattggccatcttcgcgcatctgtgcgagatgttcattggggtgcgcccatctcttcggctgttccggtggttcttcaccgtgcagtcggtgtcgccgccatcggtagtcggtggctgctacttccagccacgggggccggtgctgaaccgctacatcccctgcgccctccgcaagaagtgggacgactggaagagcgactggttctacaccccccttgccgacgaagtgcgcctccgacttccgagccagcccccggctcaggcctccagctggcgggcgccggtagatctgggggatggctatgacgccgtcctcgaccgcctggcgggcctgcgatcccaggggctcacaagagccatggtgtacggcgactacctccgtcgtcggattgcgccgctccagcggcgcgctcggggcgcctgggagtacaccgggtccgaagacttcatgaggactcaccagggagtgagatgggactgggctcctgaggacttcaagatattggtccaacgggtgctgaatctcaactccgtggaggcggccctcattcctcaaggaatcctccccctctgcagcgatccagaccgcgcctccatcctgaccattatgatggcggtcggggcctcagaggagcgagctccaaagggccacgacggcacaggcgggagccgccggggggaacaatctatcccgagagggggtcgtgcttctgggtcccgcgacaggggcccggggagcagccgccctgccgatgcccgggggaagaggaagcagggaggaacacctcccccatctcctccccgagggggcggggcggcgcgtgccagcagcaggcgcccggagggggccgcgccaacatcgcagcccgagggggagcgcaagaagaagtggccccgcaagatgggggagacagaaccatctcggggaaacctcatttcccctccaaagtggtcgtttaaccgaccccctcgcaggttcgtctctcgcccatcgtggttgtattcattctctcaacgcgagtttttactcacccatctcgttcgtcttctggtcttttcttttgtttcagcgagatcccgtcgcgtccctcccgccattccaagtccggccagtctgaggctgaggatccggcggccgcagaggcccgcaggcgggaatctgaccggcgagaggccgcggatcgcctacgggaagccgaggaggccgcccaggaggctgcccgggctcgccaggccgaggaaatcgctcgggaggaggccgcccgggcccgccaggccgaggaagccgtttgggaggaggccgcccgagcccgccaggacgagatgttggcgacttccgaggcagctcgcgacgaggccgcggacgcgtcgcttgggcccactccctcgggcgacgctcaggcgacaacttccggggcagctggcgacgaggctgcgggcgcgtcgcttgggcccactccctcgggcgacgcttaggaccaaccgggtccgggagacatccccgagtccggcacttccatcggcggcccgagccacgtggcatcctctccaaggcggctcttccccacgccttctatcgccccactgaacacagagccccttctgcaggccttggccgccgcaaacaccacgatgttggatgggttaagtgcccaggtggaggccctgcaggcagagcgggcggagctcgacgccgcgtgggcgcgtgtcgaagaggggcgacgctcggtggaggccatggtggaggtgggccgtaaggctcaccgccggcatgtctcggagcttgaaacccgtaagaaggtgctggcggagatcgccaaggaggtggaggaggagcgggaggctgcccttatcgccaccaccgtgatgaacgaggcgcaggacaccctccgccttcaatacgggagttgggaggcggagctagggaagaagcccgacgccgcccagggggtgcttgacgctgccgctgcccgagaacagcgggcggcggagacggaagcggcgtcccggcagcgcgaagaggcccttgaggcgcgcgccatggcgctggaagagcgcgcctgcgtcgtggagagggatctggcggaccgcgaggccgccgtcaccatccgggaagcaacgctggcggcgcacgaggctgcctgcgccgaagaagagctcgtgctccgcctccgcgaggacgcgctcaccgagcgggagcgagctctcgcgggggccgaggccgcggcgcaacagctggcggacagcctgtccctccgcgaggcagcgcaggaggagcaggcgcgccgtgatctggaaggtgcccgcgccgagagggccgcactgaaccaatgggccgctgagctcgaggcgcgggcgaaggagctggacgcaagggcgcgcagcggcggggcggccgcgggcgaaagcgacgtagccgcccgcctcgcagctgccgaacacaccatcgccgatctgcaaggcgcgctggactcgtccgccggggaggtcgaagccctccgcttggcaggcgaggttgggcccggcatgctttgggacgccgtctcccgcctagattgcgccggtcggcaagtgggcctctggagagggcggaccgtaaagtacgccgacaaccagggaggcctcgcccagcgcctctcgaagatggccggggctctccaacggctccccgaggagctcgagaagacaattaagtcatcctcgagggacctcgcccaaggagcggtggagctcgtcctggcgagttaccaggccagggaccccaatttctctccatggatggcgctggatgagttccctcctgggaccgaggtccgggatgccgccgaccatatcgtcgacagcttcgagggctcggcccctcggcttgcgtttgcccccaactccgacgaggagggcaatgccggtggtgcagacgacagtgacgtcgaggccggcggtccgggcgcatcggattgagcccccagacccccgccattcttcagttttttcttcttttcttttttctaaggccttcgggcctcttttttgtatagatcaacttaatctgtaatcaaaaatgaagaaatttttgtgttaatttcatcttgctgtgagtatgagatgaggatgatctgtgccgtggtccttttgtgtcttagcttgattaagggttcgtgcccaggtcccagtcctcaaaaggcgcgggtcggggctagtgcctggggagatccacatgtcgagactggccaggccgggaacgtggtgaccgagggttatgggtaacccgattgtgggtttttgccgattcccccccggagttcaccacgccccggggcacggctcggttctgggccccgtttggcgattttagccgacccgagcccccgagggcaggattgagcacgagtgacctatttcaagtcaagattcttcaaaaggaaaaaacagcacagacacagcctttaggaaattgaaactgtctttattgaaatattgaaataagagaaataagaaagtgcatgtgtggcagcccccggccaaccctgcacgcccgagggggtgcggggttggcccgagcccgaaacctgacacccgaccccccctcaggggtagaagcgacgaaggtgttcgatgttccacgggttaggcagctcagtgccgtcgcccgtggccagccgtatggagcccggccgggggacgccgaccactcgatacggaccctcccacattggtgagagcttgctcaatccagcacgcgtttggacgcggcgtaggacgaggtcgtcgacgcagagtgatcgggcccggacgtgacgctgatggtagcgccgcaggctctgctggtagcgcgcggctcggagggccgcgcgccgccttcgctcttccaagtagtcgaggtcatctctacgaagctgatcttgatcagcctcgcagtacatggtggcccgaggagacctcagggtgagctcggatgggagaaccgcttccgcgccgtagacgaggaagaaaggcgtttccccggttgctcggcttggtgtagttcggtttgcccagagcactgctggcaactcctcgatccatgaatcgccgtgcttcttgagtatgttgaaggtcttggttttaaggcctttgaggatttccgcattggcgcgctccacttggccattgcttttggggtgggcaggtgaggcgaagcagagcttgatgcccatgtcttcgcagtagtcgccgaagagttcactagtgaattgggtgccattatccgtaataatacggttaggcactccaaaccgggctgtgatgcccttaatgaatttaagtgcggagtgcttatcgatcttgacgaccggataagcctcgggccacttagtgaacttgtcgatcgcgacatacagatactcaaacccgcccggggcccgcctaaacggtcccaggatattgagtccccagacagcaaatggccacgaaagtggtatggtctgcagggcctgggccggctgatggatttgcttggcgtggaattgacacgctttacatcgccggaccaggtcgaccgcatcattgagagctgtcggccaataaaaaccctggcggaaagctttaccaaccaaggtgcgcgaggcggagtgggctccgcattcgccttcatggatatcggcaagaagcacaacgccttgttcccgaggaatgcacttcaggaggattccattagccgcgcgccgatagagggtcccttctaccagcacgtagcgtttggagatgcgatggacgcgttcactcccttcgcggtcctcgggtagagtcttatctgtgaggtatgcttggatctcagcgatccaagcgatcaatctaagggagctgggagcactcccctcgggtcccgaggcctggactccgacgggcctcgggggccggtcaggcgcatccgtctcccctaaggggttaggtcgcgccgacggctgggcaagcctttcttcaaaggcgcccggtggggtctgggctcgcgaggacgcgagccgtgagagctcgtcggccatcatgttatcccgtctgggaacgtgccgaagctcaatcccgtcaaaatggcgctccatacgccgtacttggcgcacgtaggcgtccatctgcgggtcagagcaccggtactccttacagacttggttaacgaccagctgggagtcgcctaacaccaggaggcggcggatccccagtccagctgccactctgagcccggcaaggagtccctcgtactttgccatattattggtcgctcgaaagtcgaggcggaccaagtatctgaggacgtctccactcggagaggtcaacgtgacccccgcaccggcgccttgaagagacagggagccgtcgaactgcattacccagtgagcggtgtgaggcagctgcgaggggtccgagctggcctcggggatcgagacgggctcgggagccggggtctactctgccacaaaatcggcgagggcttggctcttgatagcgtggcgtggttcaaagtgcaaatcaaactcagaaagttcgattgcccatttcaccacccgtccagtaccctctcgattatgcaagatttggccgagggggtaagacgtaaccaccgtaacccgatgcgcctggaaataatggcgcagtttcctcgaggccatcagaatagcgtaaagcattttctgggcctgagggtatcgggtcttggcatcccggagggcctcactaacaaagtagacgggccgctgcacctttcggtggggccgatcctcttcgctaggggccgcatccctgaggcgctcttctcccaagcggcctcgcggggcgcactcgtcttctgtgccgacgacctcggggtcggaggtcgacaggggcggccttcccacagtggcctcggggccgtcctgggggtcgggggctcctggcgtcgtcggacaagcgggcaaagggccaactccggtcgtcaggagccttaggccaccgttcggctcgggggcctcttctccctgctctctcccgggtcgaatcggcacagggttagcctcgaggtcagagggcgataggtgcggccttcccgcagtggcctcggggccgtcctgggggtcgggggcacctggcaccgtctgacaagcggggagagggcctgctccggtcgtcgggggccttgggccaccgtccggctcgggggcctctcctccctgctctctcccgggccaagccagcacagggtgggggtgcgcggaatgaagattgtcctcatcgcgctccacgatcaacgccgcactaaccacttgcggggtcgccgctaagtagagtagcaagggttcatttggctccggggcgaccagaactgggggagagctgagatacgccttcaactgagtgagggcacgttcagcttcctccgtccaagtaaacggcccggagtgtttgaggagcttaaataagggtagcgccttctctcccagccttgatatgaagcgacttagggcggccatgcaactggtgacgcattgcacatccctaagcttgctgggggggcgcatccgctctatagctcgtatcttctcggggttggcctcgatgcctcgggcagagaccaagaacccgagaagcttgcccgcaggtacaccgaacacgcatttatcggggttcagttttatgcgggcggagcggaggctctcaaaagtttccgctagatctgaaagtaacgtttcctggttgcgcgtctttacaaccaagtcatcgacataagcctcaacattacgtcctaattggctacccaaagaaattcgagtagtacgttgaaaagtaggacctgcattctttaacccgaagggcattgttgtataacaataagtttctatgggggtaatgaacgcagttttttcctcatcctccctagccatgcgaatctgatggtaaccagagtatgcatctagaaaacacaaaaggtcgcaccccgctatggagtcgacaatctgatctatgcgaggcagggggtaaggatccttaggacatgccttgttaaggtcggtgtagtcgatgcacatccgaagcttgccgttcgccttggggacgaccaccgggttcgccagccactccggatggatgacctcgcggatgaatccggcctccagaagtcgcgccacctcctcgcggataaaggcttgacgttccggggcctggcgcagcactttctgccggaccggcctcgcgcccggccgtacggcgagacggtgctcaatcacctccctggggaccccgggcatatccgccggtctccatgcgaagacgtcagcgtttgcccgcaggaaagagacgagcgcgtcttcctatttgccgtccagaagaccaccgatccgtgtggtcttggacgggccgtcgcccagggcaacctccttgaccgggacctcatcgcacgtgactacccgctgcctcggggcggcgggggcggatgtgccaaacctctcgtcgccaccctcgggcttggtcacgacggcgaggcggtccgcgcgctgctccatacaagcgagcgcgactttgaggtcgccatggacagagatggggccatcggggcccggcatcttcatctggaggtaggcgtagtggaccgccgccatgaacttcaccaacgcgggcctccccaggaccgcgttgtagggcagactgaggtccgccacatcgaagttcacccgctccgtgcggaagttggcgggtccaccgaaggtgaccgggaggtcgatatgacctagcggccaagtgtgccccggcgtcacaccgatgatcggctgggacggccggagcatcatccccggggccttgatggcgtcaaaggctgcgggggaaaggatgttgagggctgctcctccatcaatgaggacacgccccagcttcacgttgcaaacagtgggggaaaccaccattgcgatctgtcctccccgggcaacgcacggtgggtggtcggtctggtcaaaggtgagggcaacctccgaccgccgcgcccggcgcgtcgcctcatgagtaggggccgcggccaggagctctcgcttcatggccttgaggctccggcaagaaacgtgagcacacgctccccatcgacagtggcaatggtggccccaggctcttggaaacctaggtcatcatcgccatcatcgatgtcctcggcgggggccttctgcttggcctcacttcgccgattgccggaaggaaccgccggggactttccctctcggcgctcctgcctcctctcctcctcccacttcctcgtccgctcagccaaacttttgactacacggcagtccgcgaggtcatgaagggaagtgttgtggacggtgcaccacttgccggttgggcgctccctgctgggagcgccggcctctttctttttgtcacccgcaggcctcccctttcgggtggcccgcggagcgccctcgacggcgaggacatgaccctcgtcgtcggtatgggctgacctcttcttcctcctcctatcacgccgccctgtctgagcggcggatccgggggcggccgaagctgccacaccggaaccggaggggttccaggtccatgcctcctccttacgagccactcggtccgcgagctgaaaaagctccgcggtagtctggggctctttggaggcgatcttttcgagcatgcggttgtgccgcacaccccccctgaacgcgtaaatcaccgcgtgtgcagggatgcatggtatggtattacggacttgacagaaccgctgaatgtacgagcgaagtgactcatcatcccttcgctgtactgcgtgcaagtccgcttcctcaccggggcgcggatatgtgccttggaagttcatggtgaactgttggcacaaatcctcccaagagtggacagacgcgggtggcaagttcattagccaaccccgcgcctgtcctttcagggccatgggaaagaaattcgccatgaccctgtcgtcacccccggcggcctcgatcccggtcgtgtagacttggagaaactcggcggggttgacgctcccgtcatatttttcggcgatggtgggccggaaccttgggggccaacggacattccgaagactcgccacaaaggctctacagccgacaccaccaaccgggggcacggagggctgattcccgcgtccgtgttgaggtgacactctggacgaggaagcgccctccgttgcgtgggcagcacgtcggtcattacgccggcgctcgatgctggtgcgggcgtccggccccccacgcagatcttcccgggtcgaaggagtcgacgaaggagtggcggccgaatggcgaacagcggctgccgctcttcgtgccctccgtcttgacgacgcggagccggtggtagcagcaccagaggccttggtggcggaggaccgcccaccagcacctaggcgctgccgtgcagtcatgaccaatttggccacatcgtccagccaacgttgggctggagactccgggtcatggacgacgggcgggtgacgtaggagcgcgcctgcagcttggagcgcgccctggggcgtgctgccgtcgccgtagacgaggaggcgacgctccccatctcgccgcccttctccacctcctgtggatgtcgaagtcgcggatccttcagccctctcgagcgccttctcccgcctaggactttggcgtggagggggcggtggagtacgagctcgacggcgtgggtttggctccccgtcgtcaccgctcatactcggggagaggtcgtgcgcctttgctggctcggccattgggctgaacagaaaaagcttggcgcacacgaaggagtgcgagagctcagaagatcactcgcagagtcccctacctggcgcgccagatgacggagcgtggggctcctcaccgggagaccgcgcaggcccccctttgccggttcggccggggaccctgggtgagactctaagctcccaatctgtatgtggaaggttcgcgagacaggaagcacagaagacgccggcgatgtatacaggttcgggccgcttagaagcgtaataccctactcctgtgttttggtggattcgtgtgtgaaagagctacaaagtatgagccagcctctcccttgttctgggttcctaatctggaaaggttcagtccaagaaaaagaaaaaccccctctctcggtgggcaaggtcctccttttatatcttaagaggataccacatgcaccatttccctcttttttgtggggacctcccccaccttttcataaatggacggagatttgtatagttgccatccgagtcaccttctgatgggacggcccacaactacccccactttcgccgggagcagatgcgacgtggaatcgtggccgcctgctgacgacatgaccggagtcagaccagtcacgtcggtcattcttgtccaccacgtgtcagcttagcaatctacatgtccgcccttcttcacacaacatcttgcttgtaatggttaggatgaagcctggcatatatctgatcagggctaacgtgccatctctgggaggtaacacgctagctccagctggggacgagcgcctagaagccctcgtcctgacgggatggggcgaggcgtgtgtcagatcgcctgtggccacctaacccgcgatctgaccggtctgtgactggtcacagaccggataaacgagtgcactgcactacgttgcatgcggcgtgacacgctcagtcaaaccgcaataaatgtggtaggtgagccccactgtgctcacctaacccatacacgcggagcaaaaaacccacgaggggtcggggcgcctcggccctcggggccgaggggggtgcagcccgaccccctcggggggactaggaggagggcgaacacatcaccctcgggcccgacgtcccccgagggtgccaggccacgtgggcgattgcgtctgcctcaaacctctagtcatgatactcctgatcccatgtcaccgacactatgtggactctaaactaatctttcaatattctttaatttttaatttcaaatttcagttacttctaacttgtattcctatattgactttaaactcttcttcccatgtttttcttaattttgaattttagttatttgtaaattgtatttttatacggactctaaactatacttttaattttattatgtttattttgaattttagttagtttaaattcttatatggaccctatactctacttctaatattccttattttttaattccgaatttctattttttttcttaattgtatttctatatggactctttactctacttctaatattccttattttttaattccaaatttctattatttcctaattctatttctatatggactctatactttacttctaatattccttatttttaatttcgaatttcagttatttcctaattttatttctatatcgactctagtctcctcttctaatattccttattttttaattccgaatttcagctatttctatattgtatgtatatatggactctagtcttctcttctaatattccttattttttaatttccaatttctgctatttctaaattgtatttctatatggactctgctttttttttctctgattaatgtgagaatttttaggccatgagagcgaacgtgggagctcctttttctattcttttaataatataactagctgggtgaccgcgcaattgcgcggctagcttccatacaaaattatttttttaaaaaaaagttaaatagctatattattatcttaggaatttgatcaacctaaccttattatctccatgtttctagttttatatttttgaaaatcacacctatcgctacctcttacttatttgtcacccttttattttcttgctcgatctattagggtttctatttatcctccttggaacttttaaaattagacagtttattgtctcgttgggttttgttttttataatttttataagtctccgtcaaaagcggccactctactcgtctatagtccatccgccgcctccttttctttgttgccattgagattttaaaattgaacataattatcatcggtgtttatttttaactttttagaagtcccggcaaaccgtcaacagcttcgccattgtactcctctatgacccacccgttgcattccctcttaattatcattgagattttaaaaatcgaacgtgattatgattttggtttaccttttactttctaaaactcttgccaaccactgtgattgtgctgcttaacagcttgcccatcattccttctcttaatcattactgggattctatttgatttttgtgttaaatttaaccactataattttaacatgatatcatctaacaaatattttttagtaatattaaaattcaataatatgataaatagatactacttgaactctttcgaattcatattaaaaaccaatttggagttgtattttattttaaattttaatttttaaaaaatattttgttgtgttctagatggacactgcttctaatattctttatttttaattctaaatttcagtaatttctaaattgtattcctacctgaactttgtcgaattctacgaattcgtattgagatcaaattttgggattcatcatgacgtgtctatcactccgctcttttttttttctaatttcttctatactttttacgttatttgctaattaggattaccaattaatcttcgaaaaccctatatcttagtcgccaataatttataattttgagacttacatcacttgcatatataagtttgggatttacatatgtaataattttgagacttatagtctaaatacgttaaaattacatatataattttagggacttataacgtaaatacatgcttactattatttgatgaaaaatatgacgacaggtactcccttccaatttgccgtgctagtcatcaatctattgaaaaaaatgcatgacatttggtgtgctttctctccgggacgccatccatattttctccaggagtgctaggctagctatttaggcatgcatatatatatatggcagtgcatgtcctttttttttcttcgatggttaatcggatacgaattagtacaacaacacggatacgaaaaatcaatttgctgtatgattctttccatatattcattgatcaatctgcaccattataatctggacccactacgatctaacggtgtagatatttctttttttctctaattaatgtgggaatttctagcccccacagcgaacgtggtgcctccttttcgagatgtcttaataataactagcatagtggcccgcgcagattgcgcggctagcatcattatattttctctcatataataacatatatgttttctcaatgtattattcaaatatattaaaatgacaatataattttaaatttctaaattatatttctatatggactctatttttatttttctccgattaatatgagaatttcgcgcaattacgcggctagcacctaaataaaatcatatatttttttagtatgattttacttaaaatttattaaatagctatttagctatctcattgtcttaagattttaaagaccaaaccttatcatcctcgtgtttctaattatatagttttcaaaagtcacaccagttgctaccccttatgtcatcttcttctttatttgcttgctcaatctatcactatttctattcattcttcttggaacctttaaaaattgtattttatagtttttagagtttattatcacgttggatttcatttttataatttctagatgtcccgtcaaacgttgccattatacttctctacggcccgtccactgtctcttctctttgttgtcattgagattttaaaaatcgaacataattatcgtttgggttcattttttactttctagaagtcccgccaaactatcagcggctttgccattgtactcctctacagctcgcccgctgccttcttctttattgttattgagattttaaaatcgaatatgattatcatttgctttttttttactttttagaagttccaaacctttaaaaattagacttgcagtttacttttttataatttttagaagtctcatcaaacgatgccactatgcccctctacagcccgtccgccgccaaatctttattatcattgtgattctaaaaatcgaatataactatcgttggaattcatttcttattttctagaagtcccgtcaatcatcggcggctctgcaattatactcttatacaccccgctcgctgcttctactttttattgtcattaagattttaaaaattgaatatgattatcaatgaggttttttttttactttatagaagtcccggcaaccgttttccacgtttgcttcacggcctgcctgacgtccctccttttaattgtcattaggattctattttggtgatttattaacaatttttatatctcgtatcaaccaccaccactctactcctttataggcatgttacttaatttatctcgtcatgtgttttagatggtcttttctttcaataatatttatttttatcaaaaaatttagttatttataaattgtattcctaattgaaatcttaattttctttttctaatttcagattttttaaaaaaattagttaatattgtattgtgttattataatgtttttattttttattttcaatttcagttgtttcaaaattgtatttctgtttgaactctcttttagtttttctagtttagatattattttatttttattctaaattttaattaatctcgtattgggttcttatatggattcttctttcaatattgcttatttttacttctgaatttcagctaatttagaattgtattcctacttgaactcttattttttattttcttttgccaatttcggatttatttatttttattccgaattttaattaatctcgtattgggttcttatatggactcttcttttaatattccttatttttaatttcaaatttcagctatttttaaattgtattcctacttgcactctcatttccttttctaattttggattttattttatttttatttcaattttttattaatcttgtattgggttcttatatggaaatttatttcaatattccttatttttaattccgaatttcagctatttttaaattgtatttctacttggactctcctttccttttctaattttggatttttattttatttttatttcgaattttgattaatctcgtattgggttcttatatggaaacttctttcaatattgtttatttttataattccgaatttcagctatttttaaattgtacttctacttggactctttttttttctttttctccgattaatgtgggaatttctaacccccacagcgaacgtttatttttaattccgaatttcagctatttttaaattgtacttctacttggactctttttttttctttttctccgattaatgtggaaatttctaacccccacagcgaacgtgatgtctcctttcaaagctgttttaataatataatagatagatagatagatagatagatagatagatagatagatagatagatagatagatataatagatagatagatagatagatagatagatataatagatagatagatagatagatagattatcttagccagaaaagggacatggcttccaaatttcctggtacaaaccaaatctaatgcaaattgatcttatcaattgtgtcgatgaaattttacaattttgatttccccttccagacaacaatcgcagaaagtgaccttttacatgtaccgtgtttgacaaaaagaaggtaaaccggaaaatacaaagcctgtgaacgtatcacacacgacgaatatcaaatcaagcaaacgtacgatgcatgcaaactgacacggatacttcaattaattcggttcatccacttttaagcgtagtcctggtcggcaacgggctggtatgagccgatgaacacgtcgccgtacacgagcccggcgaggccgccgccgatcagcgggccgacccagtagacccagttgccagcgaagttgccggcggcgacggcggggccgaaggagcgcgctgggttcatggagccgccgctgaacgggccggcggcgaggatgttggcgccgacgatgaagccgatcgcgatgggcgcgatggtgccgagcgatcccttcttcgggtccgccgccgtggcgtacaccgtgtacaccagcgcgaacgtgatgacgatctccatcacgacgccctccagctcgctgatgccggcgacgccgtgcgtcgggatggcctacacgcgttcggatatcgaattcaccggttaatcgcgctgtccttcttgtcgggaaatatatacacagcagtttaaatctaagcctttaatctatggcgatggtgtgcgtgctgaccttgccgtgggtgacaaacttgaggaggaggcaggcgatggaggcgcctagcagctgggcgatccagtagaagagtccggtgaggatggtgatgtggccgccgacggcgaggccgaacgtcacggccgggttaaggtggccgccggagatgttggcggcgacggaaacgcccacgaacagggcgagtgcatgggcgatcgcgatcgccacaaggccggccgggtcgagggcgccaccattggtcaattgccctacacaaaccaagccgtcggtaggtcagaaatgaaacatactactgtacatatcaaaccggaaaatgcgttgagctcaccataggcaatggcggatccgacgccagcgaagacgaagaggagggtggcgatgaactccgccacgtaggccttcacggacgtggcgctgaaggagtcacccaagcttccgaatgcgagcttcaccatttttaatctatatttttttccttattactctgataagtgtggagaggtctctacgcttgaaagagagcttggcgattactgatgtggcgaagctcgttcagcttaggccccttttatacacatggcgtcgtgctggcaacttaattcgtcagcttcaattgtggtttagaatagaacgggcggtgcggatgatcaccaaaaacattttaattagacgctagcttgttctatgattgatactagcctctgcccaaccgcactttgctttgtccaaatgttttgttgctattatgaaatttaagtaggagtaggactaatgtgtggctatgagaatactaagactctggatgttagctagcagtaataatatggatcatatgttgtgcatttgaatggcaggaaatgtttgatgtgctgcggtgctgcctttgtttcttatgattctgacgaaacgaagtgaagttcttttttcttgccagtgtacactcaaaaagtctgcccggtgcttttgttccttttacaaaatataacgtcatgcctagaaaattttgaattttattaggttccaccgtgaaaagccactgttgacaagttgcgtaaaactcttcctctcaattcaaaggaaaaggtagcttgtgcaggaaaatggttcacaatttgtttttcgtctgactgttgaaactagttcaactccctccgtttctaaatatttgacaccattgactttttagcacatatttgatcgttcgtcttattcaagaacttttgtggaatatgtaatatatatgtatatacatgtatatatatatatatgtatatatatatatatgtatatgtgtatatatatatatgtatatatatatatatatatatgtatatgtatatatatatgtatgtgtgtgtctatatatatatatatataacaatgaattaaatgataggaaatggtcaaatatattttaaaaagtcaacggcatcaaatatttaaaaacggagggaatacttccatatgcatgacaaatacgagtaactagggaaagtctgctgtgtgatttggctgataattattgccctcttgttgaaagctcgcatttttcaacagttggtcaggtagaagcattctcaactcagaatatcttcgctagatacagtgaggttatactggatgtcttcaaactgcactttctacatttctagatagttcggatcaccgatcggtagaggagcaaatgggaactctaaattttgaagtcgatgaaatataatattagatatacgaagttcgcgtcaggtacagcaaaatgatagtgctaaatcggtggcaaagacgtcattaggcaaggacagacgatgattaggacttgatacattggtttcttttatcctgtaaccattgaaaattattcttcctacatttcctcccccaatggaagtgcagttgagcaaaggtgaaagatttcatttgttcggagtacatttaatcatttatacatgttggtgatggtaacagaagagaaatttttgtagtgagggcggtcgttgactgcatgcatggctgatatctggacggtggagttgttgacaatatgcagttctatccaacatcagtagtctagtttgattatcatagcttgcagggttttagctccgacaaaattacatcagagaagctgtgaattactccactagtatttcgctagcacctaacattcttttaatccatgtaagtgaaagccttaccaaagatgtaaaagctttgtgctcctatcatgtaggtcatgcagacatcatgcagaaatgcacttaacaggaaaattgcaagaatcttctgcaatttcatattctctgacaacagccaattttgtgactcgcgaggcacgcattttatagtgcagttgttagcacttttttgctatgatccaaggctcctagccactaatttttcagagattagttgcgctgtcctgctctctgcattattaagcggcaacattcctctgtgcattgctgtcgtttaatgacgctgcgaggctgcaatggtgttgttaattaccttatcgctttgcgcagaaatgattgagaaatcacgcctgcaattcggaatcttttccacatgagtgccactcttgtgtttgtctgtctgcctgcctgccctcagtgtgcaagctgcacgttccttctttgcttagtgtttcttgctcaaatattgttatccgtccagcttcaccttatctatgtatgaactgtgattaatcggaaatccgatccttgctttgctattctgtatttattgtcttccagttttgtgtaatgtcagctcaggtaatttggattccgtcacagacgcatccagcaatggcagctcagttgcagcaacggaacgaacggtgtgggatgcgttgtacacgggcttgggcttgtaggcaagaatcaataggcctagctcgttggacttccatggcccaaatttgcatgagatttcttcagcggcccaagaagatcggaaagttaccggatcaggcttaagcttaacccaagtctacgacaatttgtcactgtggcccactcgaccagcccaagcagacccacaggatactgtgatcctcttctctgaaagtctgaatccagcctagtatcttttttcgagaggataatggcacgagttctgcctattcattaaaggagaaagaagcagtttcacgtacagggacatctccaagaggtgtcttcagatttatgcactggaggagattatagcactttgagaaagtacaaagccactaacagcaaaagtcggcgttttatcatctaaacgatttgcgcttcatcgaaggctttgcacatgttgagtcaaccacatgtgacaatgactatgctgtaccatagtcattgttaaaatttctagcatttctttgtagccaaatcctccatgtcgtgtagatgaaaaggccatcaaaattctttctatgctctttgatcatttctccggcaagcttcccaccaattcagcctagtatcacggtcacaccaacaggaacaccagtacaccaccaacacattttagcacacaggctgacaggcagccagggtcgagaattattgtctttgctgtgcaccccctacacgtgctcggtcactattccagaacggaggcagtccttgaccgatacacagtggccgtaccgctcaaacacctatgcatccgatctgctcgcctggtaattgttaaccatgctagtagaccataacttcctgagtttgatcccagtttagcattgacaagggttgacttgaagtcttgaagtacacgcccactaactaatgctctcttcgtttcatatataagtcgtgttttgatatttttttactaaacaaacttatttaagtttgatcaaatttataaaaaaataataacatctataacatcaaattagttttattaaaactaataatgaatacattataataatatatttgttttgtgttgaaaaattaatgttactatattttttccaaagcgacttgtaaaatgaaacgaactagctggatggcctgcacaattgcgcggctagcacctaaaaaaatcacatattttttatatgattttacttaaaatttattagatagctatcttattgtcttaagactttgaaagaccaacccttatcatcctcgtatttctagtttttaaaagtcacaccagttgctaccccttatgtcatctcgttctttatttgcttgctcgatataccactatttctttttattcttcttggaacctttaaaaattagattttatagtttctagagtttattgtcatgttgggttttatttttataatttttagatgtcccgtcaaacgttgccattatactcatctacggcccgtctaatgtctcttctctttattgtcattgagattttaaaaatcgaacataattattgtctaggttcaattttactttctaaaagtcccgccaaaccgtctatggctttaccattgtactcctctatagctcgcccgctgctttccttctttattgtcattgagattttaaaatcgaacatgattattagtgtttttttttactttttagaagtttcgaacatttaaaaattggacttgtagttccattttttatattttttagaagtcccatcaaacgatgccactatgcccctctacagcccgtccgccgtctactgtttattatcattgtgattctaaaaatcgaacataaataccgttggaattcattttttattttctataagtcccgtcagccgtcggcggctctgcaactatactcttgtgcaccccgcccgctgcttctcctttttattgtcattgagatttaaaaatcgaatatgattatcaatggggtttatttttttttttttactttctagaagtcccggtaaccgccttactcgtttgcttcacggcctgcctgatgtccctccttttaatcgtcattaggattctatttggtgttttattaacaatttttatacgtcgtatcaaccgccaccactctacttttttataggcatgttacttaatttatctcatcatgtgttttagatggtctcttatttcaataatctttatttttatcaaaaattttagttatttataaattgtattcctaattgaaatcttatttttctttttctaatttcagaattttttttaaaaaaatagttattaccgtattgtgttcttttaatgtttttattttttattttcaatttcagttgtttcaaaattgtattcctacttgaactctcttttaaattttctaattttggatattattttattttttattctaaattttaattaatctcgtattggttcttatatggattcttctttcaatattgcttatttttaattccgaatttcagctaattttaaactatattcctacttgaattcttcttttattttcttttgctaatttcggatttatttatttttattccaaatttttattaatctcatattgagttcttatatgcactcttcttttaatattccttattaatctcatatttttttattaatctcatactatgtctatatgaattattcttctaatatttcttattttttattcctaatttcagttgttcgtaaaatgtatttttacttgaactcttattgaactcttatatttgatttttctagtttctaaatctattttattttttattatggatttcaattaatctttaattgtgttctacatgaactcttctttcattttttattgtgttatttcaaaatcaaataaaaatccgtgcacatgccatcatgctattctggttgctgacgtgtgcatcacccaaatacggctcactgtgcagccgcacggcttgacccgctgcttcggatttccgtcgctcgctgctagcatctatcttcatatcaacaaaaacgcatccaaattactgttctatagtggttcgttgcccgctgctttatttatatatgtgtattatagcctaattcatctctaactctggttaattggtttaggaaatcggacaaaactcttttgagtccgtttgcatgtaaaggtcctagctagagattgattctaattctacacgcgtacggtactccgtatctcttaattaacatgccaagtttgtcttaaatctcagacattgaaatctatgcctcttacaatccaacggtgtaaataattcatattttcttcgattaacgtgggaatttctagcctccacggtgaacgtggtgtcttcttttcgagctgtcttaataatataatagatattatcattgaagaatatttaatccattatctagaaaatataaactactgttgaataaacagttatcggaaatatgccacgttagtccgtgcacactcatcaactaccctttttccaaattctcataaaaaaaattacactagaacacttggttcgacagaccgatctatctaatataatgatatacagtggcagtgtgcccctcaaacatggtctgccaaaatgccaacaccactgttacatttgggcaagcacgggccggccgctcggccgcggggtgatagggcgatcgacgtgccgcaacgcaagccacacgcacaccaaccgtgttcgtttatctcgtcgtacggagcagatcaatcgaatagctctgattgaccggagcacgtacactgtgctgtccgtctgccaaagctcgatcttacatatccatctgacggccacggcgagacggatatcgagtggatagatggattcacgcgcccacaaagatctgcgtgccatccgaggctaacccacaagtggggggaatataacatggtgtttgtcggccactttggagtcctttaatattttgcagcatactccgtacttgtacgagttgttgatttgattcctctgcatcggcacgccgccgaggagaagaaaaaaaaggcgagggtgccgagcatgcaacgcgatcgccttctagagtcttcttctggattagtacgtaccgatcaactaccgagtaccacgtacatatcgcaagtgccagaggaagggatggatgatggatcgtcgtctttcatgcatgaaactaataatcaagcagacgtgtaatagtgcttaattattgaagtcttaattaagtactagtactgatgtgtatggttcgtgtttcgcgatcgtttgaagacgatcgatgtggatggagactgatcgcgatttggagcgtaaacatcaaccgatcgatcgagttgaggacagtctagctcgtttcctcgatccgatgacgatcgataatgaatgacgggaagcaccgcacgtattgcaagtagggtttgacgacaattagttggtgaatgtcacgcatacaagacctaggctagctcctcctttcactagttgtcaagttgatacttctcgtcaaacatgacatgtctatgaaaacatacatatagctttaattagctaggatggagtagtatcatacattcatacacacacgcgcggttaattaacacggggacaatttacacagggatgatctaattacctagcgatgggcacctagctagctagagctagttttgtacatgacggggtgacgcagtgaaaatgaaggattgatccatcagctatggtccgtattagaccatagctctttagcacaagacgtccttgagaagcttgtacctacggacagcgccggccttggagaccctccggccgccgccgccgccgccctcctgctcgcctccgccggtcgacgccgcctgcttgctcctgccacggtactccctggagaacggctcctcgttcccttccgacgatggccccttcttcccggcgacgacggcggcgtcgctgaggcaccagtcgcacacgccggcgcccgcctccaccggtgccccgtcgccgtagtagttggtgcagtagctgcatgcatgcatccgttgccacgacgcgtcagttctgatcactatgtacctacctagacgccaggaatcaatagggagagaggtagaaattaacgaggcaaatacggaggagtgcgtacgagtgctggaagcggcggcggcagcgggcgcagcggaagagcttgtccgggaaccccacgtcgccgcacatggagcagacggtgccgccactggccatggccataccgagacggacgtacgtactcaggcggcggcgagatagctgactcggccggcgaggaggaagagagagagagatggaggagatcgtggcgagagaaaggaagtggcaggatcgaatggacggagaagggttttaatacgctccagctccagggagtgagaccgagagtgagtgtgaccgtgcagaccgcgtgagatatagaggagagagagatcgtgggtggatggtggtggcagagtgggcggctggcacttggctgcgtgatgcgtggggggacccttcccaggtgcgcggtttttggttggacgaggcgggggccgaccgggttggagacgggccacgtgtccatgtatacgtacgtacgtgtagtggatgtaggggaaaggagtggcacaagtaatcgccgcgtcagttatcatatctgttgttcagagctggaagcttttaacggcgtttaccagtactgcgcactactccctccgtcccggatgggactaagaagattcgtagttcgacgttgctatcttatgtgatgaggagagtaccgccgaagatcgaagggtggttcagattaatttcattttaaaccatgttactttttgtaaagttgtcaaaaatatatatatatatttattttttatcaatctttgataaatacataagaccgtatcaaaacttgataatattgtcaacttactaaaattttgggtaagatttattttagttataatgtgaacaattctaaaatcgctttctcatgcaaccatgtaaatgtacatcaaatgactcaaaacttacgaacgacaactttttctacagggagataattaaccactgtaatatacggagaacatcgacgacgtgaacaaacaacgagctatactagctagctagtaggcaccgtgcataattaaccttcaggagagatcggaaacagttaatgctatagtagatcgtacgtacgctggctcttggctgtagctcgatcggtcgttggtgcccaggggccagacgtccgcgtacgattaatcatatcgatcgatatcgtgcagcacatttataagccgtccggtactccccacatcgatcgatcgatcgtcgtcgctggaacagcagctactagtaggtcggttcgaccgtgtccttcacgtccatggacggatcgagtacgtccgagctagtcgagtgatttgtatacatgcaggggtccctggctagctaatcgcttagaccggaagaatcctgtagccgcttaccggccgctcaaattaatcatggatggagacgtcgcacttgacacacatacacaatatgcatgcacgcacgcacgcgtacgcactgtacgctcgctgtagaaccaggagattattagtgatagatggatatcatacaatacacagggggagtaggggatcgatgaagacgtacggcaaccgccgagatccattgaactgcgccagtgcagacgcagatacggtgtatcatgtacacgccgtgtgggcgccggccgtcgtcgcgaccactgctgcggcatgtgtgccgatcgatcgattcttgcgatgcacctgccgcaccgcctgaatttgtccaagcgagtaatgtgcgaggtacggagtacggcccatgcgtcggccatggcacgtacgtacagacacatgcaatgaaatggtgtgatcagccatgatgaatgtatggtgctaattaagctagctatacaaggagtactacgtactactataccaatgcagaatttcattggagcaagaatttttttcaggaataatatggactgattggaacaatattttttttctagggaagcagtgcagtacatattcttgcatgtcaggtctagctctgccttgcaatgctgcagcgctacctcatcgctgcctgcgtggttcctcttcggaggcaaaggcagcgagaacgggtgcttcactgcttcgccgcaggcctgtttgttcttggacgttctggaaaccggttgattccacgccacgcaagtctcgtctggatcggataaggaagcagtctcttttcagagaactgatgcgcgcaggatatcctgcgcagaagaacgcttgcacgttgcagttgtctccacgtgcagctcttgaactcttcaagacctgttgcactcttggttcttgaaccgagaaacaggttatgaactcttgaagacaggttgtactactcttgaacagatcgatcgacaaacaggttatggggatccttttgaatttccttttcgattccatctgaaaattctcacaacaatcaactctatcaacacatcaactccagacctcagcagttcagcaaatgcaacagatggagtctgagaagctcagatgacacagaagcaccactactgcacactgcaacagcgaaaggagattacgccctcacgagtcacaggaccccgcgacttgtagtggtatgtcaggactatggggcatgggccattgcctgcctagctttcctccgatcccagtagtggttcacaatctgtgatctgtgcagcttcttcaactcgcaaactgtctgttcagtgatcccctgataccagatatctggcatgtagaccatatattcaacggtacgcagacagagcaccgcattgcagctgaactgctgaagatttatactcactctcaaggcacattgcattaccggtttctcccgcacattaactgatcacaccatcatcgcatcaaagatgcaaataggagtacaacacaaacagtgcttgcaactatatttgcattggttttggaagactaggatgcgttatacccggtttttggttttggaagactagcgatgcgttatacccgcttttgcggttcagtgatatgatttaaactcgacccttagacgagagacttcaagtgaactttcttccctgatatatctgttttcgacagcccattactgtttcttgggccaataagttccagttctcttcttaaggcccattagaccacatccgataatatctggcccaacatctccatcccctcctccaatgaaaccaaaagggtatcgttcttcccgtgccgccgccgccgccgccgcttcatcccgacgccgaaagcccgaaacctaaacacctcctcttcctcgcacgcccatctccggattccaaccaaatctccgggatggcctcgacctgcttccgcgccgccgcccgcatggcctcctccgcctgccgctcggcggcctcccgctcaatcccctccgccgcgcggcgcggcgcccctcgcatctccaggtaacttcctcggggggaggcgctgcttggtgtctcttgctttttttttttaccctgaaaccgtggggtaccggatctgtgacggaatggcttgtggctgtggcgcgcaggctgccggtggagctcgggtgcagcgcggggttgtcgctgctgccgctgcacagcgcggtggcggcggcgaggctgacgtcgcggctgagcacggcgtcgcggagctgctgcgcgctctctcagggtaccctctgtcgcacctatcccggactttaacatcaatcaataccatcgatgagatgcacttgcctgtcttttccgtttgggtgagaaccgtgcccgtgcgtattattgtaccagtacttcattttcttcgcccgctactggcgcaattacttgttcatctgctgctgtttgtttcgtcaatgtaatagttttgccctcaaccaagcgtttttgtgctcagctctcttatttgtgtgattgatgtgtgacataactctgtgccgttgtgaacatataacgatttctatgcatacactaatcattttctcctttagtgcactaaaatagtgttgcatacatgatagtgatacatcaacatttttacagtacaatcctttttttctttgatgatcaacacaccatcacatcaatttcatgttgtatataataagtcaagagattcgcttgttaagttttctttttttttttgatgaattgaggtcaattgagtaagacatctggtttctgcaggcacatgacttgctagttcttgaaagattttaccaggagcttgctgttttgcttcacaatcatcgagaatgagtgccttaacatgtcaaattgtaatcaagactagcgttatgttttttaagctagaatcttagctgcctatgttgaggggcaacatgatggaataaagtaacatcattttacatgttttgcgtaatagttggctgtttgcccaagtctatttgtctgtgagatatttaatacaatctacgtaattttcctatggcatttgcaattttttcctagacttttcctgtttgcatggatgcatgctcgtttgattttttctttcaacaaagaattttataacatggttgccattttagtttacaatatgatcattcttctcttctcagatgaaagtgatggtacgtgaaacatttacgcaatgtcttaaaggtggtgcttggctgttatggcaatgctgcacatgtattactgcgacatccgccttagtcatagaatttatggttttgacactccggattttgtaaaagttattttggtagtgtcagggataaacatcaatgctgtatgcttccacacttataaagttataatgaagcaattgagatattcaaagttctgatgtatgctttatttgtgtttatatagagatgggtcagtctgtcccaaggtgataaatgctggaagacctgctcatgtcgtgctatcagacaattgattttgtagagtgaactaaattggtttctgtgttgcctgattttacccctcctagaactgtggttctgttggacctttcaaagtttttgagataatgccccttgatatcatttgttaaaaacaatcaaggacataatgcaaaagcccgagctgtatttcttagttacaattctgggtgtctttcctgtgataataatgataaatgagatgcaatttacaagtactcaattgttgctatgttgtttcgatgtatttttctttttatactgttgtgaaatgtcaatgtgatgtgtgcaaagctgaaccttagtagttacgaggttcaggagtcaaggacactccagtggtgactgaaccatagtttggccgaatatgtcatctgtttgatgtttgaattatccttgactcacagtgtcttggatgttgtctcaattcagcatttgaattctcaatgcggcattatgcttggaaaattgaactgtaaaattatgggaggtgacgggagccatcagtcgtggcacttttgacagtttgtagcattgtattcctgatgaattttgtgtggtctgtcttgccgcattgcagttcgaaggtggtgcgacgtgaagtgctagtgtcagctaaagattgtaaaagtcctatacactagaaatagaagaaaagaaacgaaatgtgaaaatgctttgctttcaagtcaacctatgagaacagattaatcaaactcagttcgttaattctaacacaagaaatagcaatccttcagttttcccagtaaccctcctattctcctaggcatgaggagcagagaaaccctgcttggtcactcacggtctcacgccagtaaaggcagtaacctcttcgagcaagccatgctcacttactcatgggttcgcgcctgcttgccaccgttgctgtgtctgtttgcctttgctgccggctgctgccgctgctgttgttgttggcttgttgccgctctcccgcctgcagcgcctcgtgcgacgacgacgactgcggcggcggtcgctgctcctgcacataggacggcgtacccggcctgaactgaccctgcccctgcctctcgccgatgttgccaccgccttgctgcggtggaaatcgcgggagattttggtgttgagcaccaacctgagcctgatgtgcgtcccacccttgctctctccggttgccctgctgccgcgccaccggacgagaagagcatgccatggcggcggcgagagtcccagacgccgggtgaccgtgccccgcaggccagccgttgggcgccacgtgcggctgccccggcgtctccagcattcgaccggctgctgacaagccgacggcgccgcctctgctcgagccgggacggccgccgcagtttggctgctgcggccgcggcatcctcgcgaggttgcattgtgtgcgctgtgccatcgccgtcgcggggagaggcaccgcgagcggtgtcgacggcatcgcgcgtggcgtggcctctgcatgcggcaccggcactgcaaccgctcggtgtcggtgacctcctgaacacgatgagttgccgcaccggtggccgccggcggactcgttggcttgccgccacagcttacggcacagtgccaggtgatgattgacccggtcgatctgccttttcagcgacactttcaacatgaacagctcgaagaactcctcgttttgcgaacgtaactccttgtacactacaattcatagtttcatacatacatgtgcgcacggtcaggatgaactgaatttagtttatctcaactagctcgatcgattttgcagatgtgaacgttcatcctaccagcgtagtagattaccggatcgatcttgctcctgcgaaattgtcggaacatttgtcccttggacagccgtgcttccaggcacctcgcaatcacgtccttcacctgcattgatcgtcaatttatcacacatttgcgaggtcgatagcatcatcggcggctcggccaggggcgggtctacagtgtaacggccggtgtcaagcgacaccgacgaattttggcaaaacgtatagttaaattgcttatccatatattatagcactatgatttaagcataattagcatactatgacaccagtagatacgttatgacaccaacgaatcaattttctggatccaccactggctcggcgagccgtcagcgcaaacaacatatatttgtaaatgaaaaaaaaaaatatgtgaataaaacttgtatatacgtattcttaacaatctaaaaataaagactacgatgaaaagaaatcctaaaaattaaatttaatttttggctaataaacttaagcataagtgaaaagatatctcttattcttgccttgcttacatgttggagaatttcttccgtatcgtctacaggtgccgtggcatcatcttccgccggattttgatccgcgccgcttgcgcttggcatcgccgtcgccggttattcgctgcagcggtggacacaacgcagtgcattcgttaccccacgatgttacaccttctagcttaattagctagccgaagatggcgctccggtggaaggagggcggcttcgttcccagcgccggagaagagagagaggcctcgctcgcggcggagcttgttggagttgggattctggaacggagagaccgcgaggcgagatgagcgctatcgcgtcttctttaacatgtcaagagcgctcgtgcagagacgggtcatcacgcgcgcgggagtcggtagcacacgtctacggctgcaacacgagtggcctccccgaatattctggtactgtggtctgacggttactagtagaatatttcacaatctttaatagattataaacgcgtaatttatctctgaacggagtattctttttttcttctggacttgcaaacctgagcgcattggaatagttgataatgcactggaattgttctggttgcagttacttggacaaacaaatacttctagaaaccttgtaaaaaaaaagtcgcatcactgtaaacaaatcattaaatcaaacaacgaacaggaattaacagcatggaaaaggagagcatatagggattatcagatcataccaaaacaagaaacttgtcagtttgccactgtacatgtacatccaaatcctactggggaaataatgttgtgcctgagaacagtacttgaaaccacaacagaagggaaagtactataatttggccctgactgttcgtgtcatgtttaagaacagtgttcaaatgccaatcaggtatacagcctgaaacttctatcatctaaggacgacaaaccactgctattatatacaacaaattttctgatttcagtagttggcactgcttctgagtactgacagcatgtgcgctcattttagtctctccgtgctggcatctcggcaagaggtttcaaaacaatcggcttgcttggatctaccacaagtgaagaactcgtttacagaaaagccagtgaccaggggagctttcctgtcctagacatcttcaccattgctctctcaacactagctatctgattgtcggttgctgcatgctccttgattttcttcttatcagctttcttttgtgcatcttttattgccttttgcatcttctctgctgctctcgctctcttcttctccaacttgatctgtttccagttgaggcacaaaaccaacaaagtgtcaaacgacaactctgactatatcccaaattaaaataaaagataatcaatgcagtgggcatacgaagcatacctcaattcttttcatcttctcctttgcctgtgtaacctgattcatctgccattcatcgatatcggcctctttccttctcagcctaatcgaattaaataacatcataactcaatgagttcgaaatataaccttacgggcacaaacaaatctaaatgtcatataaacttaatcaatgacagcattttgtaggctatggattatgaagatcgaatattcaataaactagacaatcacaactcacaagcattcatgtttgcagtagtaattgataatggcttcaattctaatataaggctcaagagatataatgctacattttaatcagctaataagcaataattttctacaagtgtcagtccagaagttatgactgagagatcagaagatgtggattacttgtctatgagcttttcaatctccgcattcttccaggcaaccaacttggcgtggacaaaattttccttatgttttaccgcagaaccctggggccatctccccattctttgcactgcaactgggctattttcgccatctgaatggttaaacgcaccgccattatgatcacttccctcataggcaccaccagcctcaaagttccaatcacgagctgcagatgaaagaattgtcataaaaaatatttttcagaactgacgagactcatgagatttagatcagtacctgaggatatacgagaagacagagtatcagcctgccaatccgtttgatccactgcttcatcctcttcttcactgactttgggcaatctccattcattgatagcatccattgcccccaaacgcctacggtaattatgtgaggagcgagctcggcgcatcaatctagctggcgtggccttgtggatgaatcttggtggcactggattagttctctcaactgcatgttttcaagcgcattcaataaatgatgcgatgcaagaaaaagtcaagttaatctatggagggaggcagcagaagtaatcacatctcctatccagaagggaaggttgtctgggcgtttgcagtctgatgtgtcgtggtgtggtagacggatttatgaaatctcctctgtttggcagcctttcttggtcttcttcctgcagatgattggcttcttaacatttccaaatcacgtatgggaaatgaaaaaatcaaaccggcagatagtacaactaaatggatacaaccaaaagctacttgtaataattctatatggacccagacagagaattatccaaatttagtttgatcgtgtggaaaacatgtaataacataacaaacaaaatgactgagctaagaattctctagtttttggctatttcaagattcagaaagcagaaatgtaacagcaaaccaagattgtcaatacccttactgctttgatatttgaatcgatcaaaggtcacaaatcaaatccaggaacattgataaatcttgcattgaggcactagaccaatggttaaactggaggcgtttgttcctgtaaaccatgcaagaaactgaacaacctcatccaagaaaccaccttcctccaaagaactaacgcaagaagtcggcgaagttttccacaattcaatagttacaagctacgcaagaatgggaaattaagaccaaaggcagcaaaaaaatcaagaaccttcaggactgcgcctccccctggaaaaagaacacggaaactaaccagccgtggcgtgacgaacgaggaggcgtcatcaccgtcgcggcagccctcccctccattgctgctcacggggctgcagattggggacggcgaggcggggcggtggtcggtgagcgacccggcgctccacgcggcgcagctgccgtaggaagacgccgggcggcggccgtagggccccccgcggccgcccatggcggccatcgcgagcagcatctgcgtgctcctcccgacggacgcctccggctcggcctcggtgtcggcggcgtagaacgcggcgccctcggaggcgtcggagcgggcgggggacgagcccggcgagacgcgggacgccgcggtgggctccgcgacgcaggggatcgggatcgggatcgcggcggcggccgccatcttctcgccgttcttcttgccctcttccggtggcggtgccctccccttgatttctagagaggaagcaaacgttagtcgcggagcgcgcgaggaagttgtgtatttagacttgagagttgagagagaggggatgccttctgactggtgggccaggttcttgtactaaccttcactgacatgcgggcccggttcgtagatagctgtgcaccggcatcagttcgctgcccttttcccttcatctcccgttctcttaactgaaccagcactaaaattagaagcaccacatgaacattcaagaagcaggatatcatctgacaatatgaatacatcatttgcgatggtatgtgcagcgaacacaaattttctgttggctctactgttagtcaggaactaacaagttctgccataacttatgaaacaatattccgtgccatgtgtggcttttagcttgctacaactccggcgcaaagacaaatttgcacctcaattgagttttcatactgtaaacttgtgggtataggggaattggcaaggcgccttttgccctaagttggaagaatttgtaacaacttctaagatcaagaatattccaggagcacgcagagcttctggacttgcaatcctactaagcagcaacacctgttgaatagttcagcatcgtccctttgactcgttgatggcctggtaagatctgctgcaagaaaagttcaatccatagacagatgaagcgcagctcaggggaatggagcaccaaggtgatcagacttcatacccttttgcaaagcaccctgcccttctttcccattccagtgccagcgaggcttgcagcgagacgtgacttgttgtcaggtctccacttaagctctttgaaagtggagaaaagctctgagagggcagggctgatttcctcatctttgattttatcacaagagacaacttttaggctctgcagatcactccatgaggttatcaccgattctagacctcgagttgtcagttgtgagcaaccttctaaggagaggaacttaactctcctgaaaaacaaagagaacgcagcagacataagtcaagatcctgaattaagccaagaaacactttccacgaaaaatgtaggttgtggaccatatctaggtatgtaaaatggctcaccatttccagaagaacaaaacattattacaatactattgccagtgaaaatatatagtaagtatttgctaaagcgttttgagaggaaactattgaaatatccagatgaaaatttgagatggtcgtcgtgctactgtggaagtgtggatgaaggtaaaacatggttttagcctgtaggtaatctgatgtcaactctaagaattccagttacacgaatgcatctgatttagagctttagaggttattcgttcattttattccactaattcattgcagtagattgctgccatattcacacaaaaaatgataatatgccacaatcgatggcatataagcaaataatgggtcagaagaaactgaaaattattccacgtatataaagaaactacctaccctagttagccctggcacttccaatgcaaatcttggcattgatcagtactagtaacagttataagactctagtccagggaaaaacaaatacagggaagtgtaggcggataacatttacgcatcataaataactacatttagtagcccaaagaactacatcaaaagactctaccgagacactgtcaatttgttggcccttttagaacaagtaatcctttactgcatagtttggcagaagatccatgagcaaaaatgcaaatatcctccaacgaatattccataacatcaatccacggtttgtgatggaagaatcggcatggcaataggtggtagtggtttatggtgaatctgacaccaccccaccactgcctattgtctgtgaagaaaaaaaacgtagagagcatggcatggggcaaaaggatatgtcaacaataatttatttctactacatacattgcaatttttttttttaattccataacaaagtatgggcactcagctagtctttactgaatccatttgctcaggtagtggtgcacggtttgtgttcgaagaattgaagcgacctacatctttatgaaatccatcgctcagacatctaagtcatggtttgcatttttaccagtcacaattatctggacacaaaaggagaaagtgcacgaggggctagataacgcacatcctaaaatggcaatatagtgaataacacaaacagcatgtgacttgctcaacacaagaggaagaataaaagtgattatgacaaacaatataacgcaaatacacaattatggaatactttcacttgaacacatctgtaataaataattgcatcttttccaagcaatcatatgctaaaacaaccaaaaatgacaatgttagccaaacatgcagtatactgaacagaggttgactagattatggagcttatcaaagctcacacagacataatcagtagacaaaaggaataatgatggaggctatctaagtgaggtttttacgacactaccgaataataaattttgcgccctcaagtcccatgataactgttatttaattaattaccacagaagcaatagtggcatactgactccaaacatggaggggtccatgcattgcaatttgcaagcattatatctcctgacactaaaccagggtcagaacaaccaatcatcagttacctacgactacttcaattggcagcaagtcactatcacagtctgacagatcaaatataaagcaggaataactaaacaatcaaagttcaaatacacaatctgcccacattgtgcgatcattgtaatatatcaacaacctagattgaaaaatgagattggtgattactatacctgcacagtcctgccatggcaaacatgtcatcttcaaggccccagcaattctggaccaataactcacgggcaccctcacaaaccaaaaggagagcatggagggcacgacggtcacgcagctggcactgctgaagctgcaggctctcaagcgtgaggcaggcaccaagatgctccgcaggcccaggatcgtcatcaatcctgcaacatccttgcaaccttagggttttgaggttgccgcagaaagcgagcgcagcaagccacccattgtccatcttgtggttggcgatggtgagctcctcaagcatcgcacagcaccgccccacagccgcgatgccgtcatagcttccctcgcaaccaacaagctccagcttcactaatctcttgcatccatgagcaaggatggtgaggccgatgtcggtgacaccaccatcttcactggtgccatataacgcagaggaggctgcgacaaggcggaggatctgaagatgcgcaaaggcggagactgggcggagggcgaggtcggtgcatcggtggagctcgagctcttgcaaagttgcgcagccgccagcgatatccatcagacccccggactccgaggcggctgtggctgagaggcggcggaggttggggaaactggcggcaacggcaacaaggcccctgtcgagcacgtcatctgcgaggaaacggcaggcgacgagcggcgggtccgcgccggtgtctagggttagcgacacctcggcgcaggtgaggagaggggaggtcggggacggcacggccggagcgacaatggacgccgggaacaggtcgaggtccgccagttcggggaagcggtggtgtaggcggtgggtcacaaaggcccagtccctgacgacgaggcggcggcgcaggcgccccgcgaggcgcatccacctcctgcagaccagcgacgcggcgcccgtgaggtggggctccgggaggcaggcgaggacgcggaggaggagcccgtccgagaactctagggtttggtccggcggcgccaccgccgcgggccgcgcctgctgctgctgcttctccaccggcggcggcggcggcgtcgtcatcttcttcccggacagcgaccgcaggtcaggccaccccttgaggccgtcgcggtgcaggccccggccaccgaggacgccgacctcgggctcaggcattcaccgcgaacggcggcgcagggccccgcgtagccccggccgcgccgcgagaggagaagcccccgcagtgcggccgggcgcggcgtcggtccgattcgggagagattccggcgtggtagtgcggccgtgaggggatctgaggactttccttttttttttttcaaaatttttgggggggtttgggatttggaaatttgcctcgcccctcgctgctggaggagcgggataagagagagggtggagcggaggagccgtggggccgagcggtggtgggggcaaacgctttgaaatcctttccttgtctccgtgtgcaaggtagtatagcgttcgttttggctccttgcgccgttgcgcggccccgctgtgcacggtggaggattttctcgagagttttccttttttttgcttgtgtcttggcggagagttttgatggctcgtttgtttcttctgttcttgagcgacgtgatccgggttgttttactcggcacggtttcgtctctgcgtgagggatgaacagttccgttttaatggaggcacgtacggtacgtgaggtttgttgggtgtcccgtgtaccgcgtcattaggttgtgttctctttacgtagaaaagaggctcggatcatttacctaggctcttaagtgtttctgtaataatggatcgaaggacaattaacgccgtctgggcggatccgtccaaaaccaggctgttgcctttgcctgaactaattggcggatcccattgtgaacctccatcaaaatacagtaatgtaggatgaaattagatcacgttaatactataaatagataaaggtatattcatatttgtagtattacgatggatttctattgcatcttgtagttttcgctgtttcataacattttttttaagagcaatgctacacgtactaaatttttcttactaaatttttactaacaatcatctcaaccatttgatttaagtagatggaagttacaaaaaatctagatgcactcatagcatgacacatcagtgttagtaagaatttagtaagaaaaagttagtatgtatagccttttcctttttttaattatttgtacatcattgtaggataaagtttggtactactgtttgcaatatcgatggtcatttgtatatattttttgtgcgtctagaatgttacaaggtctactgctgtttatacatattaccattgccttgtaaccgataaagatctcatagcatttctaaaagtctcctcaaatcttgctcttcaaatatctatatatcaagatagccaaaacgatagatttctaaatttcatacgtactcaacagtttttccatattctactctccaaaattcataggtttcatatgttagtgtctcttgtcccctccttcactctcttttgttaggcatttgtaggcattctcatcctttggtaggtgtggagcccaccaagagccaaccactatgatttaccaagttcggccaacaagagaagacatttggcattttgacaagttaaatggtttatcaagcaatatgttttttttatttgctacaaatttagcaaagagagctaaatggtaaagctcttggagatgatcctagacatctatggtatgtgaaacatacacgaatgtaccatagctaaaattaatgctcaaggagacgggaaataatctctaaaaatgagaataaagtgataaacctaaatgaggttgaacgagtgggccggttaaaaattattccgttagataagccctttatctatccgcgcatactacttgggaataagtccacttactggctagcctcgagctcccgccgccatcgtcaaagctccacctcaaagctctaggaagtcctcccctccgcgtggtgacccatttgcttccccgttggtctcccctctttgcctcctggcgctccaccagcccttgtcgacgtatgacaccctacgaccctcatcgatgccatcggcccctctcaacgtcgtcacggcattggcatgccggctgccctcaccaagctccgactccaactccgttgtgggaggccatgtagaggagggagagagaaagggaagggggagtgaggatgccaccacgtggaggtcgcttttatttttgccacgcaaatgcctagtcaatacgagtagattgggttaacttgtcacgttagcaaaatcaaccatctatactattgtcacgccccggactagtaccgaccggaactagcccgtgacgctccaaattaacctgttaatcgataccagtcccaggaaacagtgctggtatcacaggaagacagattatcacagcaacagaggtctctttattatagagtagaggtacagtcatgttgggctgtggacagatcccgagctcacaattgcattacaaaagggaaacggaagccaggacttggaccaaacaacacaggcgcgacttgggaactaggccgaaaccctaaaactcatcgtagccggcttgctcctggaagaactcctcatcagcaggatccgcttcatcttcttcagcaactggggggggattatttatatagagcaagggtgagtacgggagtactcagcaagccatgggaaataagtgtttaatgcaggcttcaaggaaaggctgttgtttttgcaattgattttatttgaactcttttctaaaaacaactaggtgagtgcttctcaaacgacacggatgagacagtgcgtctcgtccggtcggagtatgtgcaatgcatcagtctttagaattgattcaaggttggcacccggccaacagcttttcaaacggccacccgggccaacaactttcaaacggccacccgggcctagctgatcccgtcagctgcagatttttcaaacatcgaacccctttccacaacagcaatttcacaagcagtagtcaaacaaaactacgctaggaatcacctcacatccgcccatgaccatgggcacggctgttcgaacagtttgttaacctctgcagagggggtacactttacccacacgacattactaacccggatcacccagcccgtggggatcagccacgttgggagacctccaagctttcatgacaaggcatttcgaaagccgacacaggtttaccatatgccgacgagaggggtcccagaccaacaacaggttaggtcccagaccatactgtgccaggaagcccaggggtcctccccgacaccaccccggcgaatccacatgtctctcggcatcaaggctcccctgataagctagttactcagccaggggtgtcccattccacccatgtggtcgtacttgtcttatgtttggatgaaattccaaggaaacggtccttaggtgcaagagcgggaaaccgtacacccggtacgttccccggtccgcggttttggaaattcatttagttcgcaagcaccgacccaggtgtcgggttttccaagtcttttgtaaaacccaagttttacccaagaggtttttcagattttaagtttgaaggcgcccgtcaatactcgcacagggtgcacgaatatcgagacgcgactagatggttacaaggggacacgatataacaattatcaaaggaaggatcaaatgcaacaaattaggtaggtccgccaatctgccttgcagacgggacaacagattaagtgcgatcctatcaatgcataatatttttcaagcaacataattaaatttcaaatataggctcaagatgttcaaaggtggcttgccttgctcgagatctagagcttgatcctcgaaatcctcgcactgcggttcttcgggctccgaaactatacgcaaaacgggacaactcaacaaacggcgaaaataaagccctattaatgacctctaagcgtgccattagagagatctcgagatttgaggaattttggaagttgaacggagtcaaacggatttacggttgggaagatattgaatttctaagattactggatttttggtctaaaggaaaaggatttaattaaatcctttttgaaaaagaaaagaaaagaaaagaaaagaaaagaaaagagggagggaaattagacttttcctcgggcggctagggcgcggcctgagagaaaaggggcggctcggccgagctaaatgggccggccggcccaaggcggcccaaggcacgcgcgcgcgggaggggaggagagagagagccggtggaccgggctcaccacgcgcggtcccgggtgggacccgcttgtcggtgacacggttcaccgtgcggagcgagcacgcggcgcacgcgcgcgggcggggagggacgcggtgtacgcacgcggttcgcggtggacgcggatgcggcgggcccacgcgcagcctcacggctcgcggtggaacgcgcgcacggggagggactgaccggggtcggctcgacccggtcttggccgagctggcgccgacgtggcgcctacgtggctgccatgcgggccggcgggaggtagacgacgacgccggccggaacggacggcggacgacagcggcgagcggcggagcgaaccacggcgatacaggcggaagcgagcacaccgggtggttgcacgagacgaggggagacgagccaactgctcggattcaccggagggagcttgacggcggcgaattgcggtggcggcaaccggcggcgggagaagggggaaacggcgacgaggttactaggggccgattcccggcggcgagagcatctacgcggctacgggaattcgatgctagcgttggattaggaggaaacgcatcgagggaggccggcgacgagaggcgcttccgagctcgggcggcgacggcggcgagcacacggtgagtgacggcaacggtcagggcggcgccggctagctacgaggaggctactcaagctactacccgagtctaaggggaggagatggagcgaggagggagaacggggagatgcactaccgtgcgggacggggcgcagtgacgagaggccggcggcgcgggagtaatctctccggccttgggccggggaagaggaaggagagggcgcgcccggagtccccttccgcgtccttgctcgtgccggctcctccgaaacgcgcaacgacgaacgacgacggcaaacagagcacgggaggcggcggcaatggcgtggaggcgagtgggagaggaagggaaagggggagctcgggtttataggatggcaatgtcggtttgggaaccgacttagggcggtcaaaggagagggctggcgctcggtggtcgcggccaaagcggcgacagggaggagggaggaggatgacgccggtgggaggaaaaagggaaaagagggagagaaaagggggcttgcccccttgcctcttcgcgaaaaggaggagggagcgggagcgacgcggcagagggaggaggagctctgcctccgtcccttggaggctagcacgcggagtggcggggccgggcgatgacgacggcgatgacggcgggggcggtgtggagcggagcggcgacacgggcgacaggcgcgggcaggcgcggcagaggctgacggcggcagcgaccaggcggtcggccaacacggcacgcgcgcgcgggatgcaacgggaggcgcgtcggattgagcggcgcggctcgggcgcgcgcactggctcgcggggccgagcggctgcgcggcagggcagcggggccgggcggcgcaaacggcgcaggcgcggcacgggcgacgaccacgcgggcgcgcgcgcacgcgaacaatggcgcgcgggcagagcgagggagcggagagggagggctcgactcggcgcagctcacgcgctcgcgcgcgcggcgcgcgggcagagcggcgaagagggagagagagagagagagagcgccggggagggagggggagatgggccgagagagattcggcccattgaccccgggggaggcaaaatagacttttgcggagggatttgatttggaaggatttggattcggaaatgagctcgacgatagatcggggatttgagatctgaggtggcacggacactagactacaagaaaagaaacaaatttcgcaattagggtttttaagagataattttcccgctaggcgcgacgacggaacgggcgctacaactatattatgaggatctaatttaattcggttttacaagttggagcttaaaatttctggtattgtaatttaggaatgtcaattaaactcaatgtttagatgacaaacgacaagtagacttaagctgctcatttacgctgctgcaatgaaggcccgaatttcatcaaagggcctcatagactgatcttgggttcaatacaaaaggcccatgtggagactgaaacccaacgtagccggaggcgcacgcacgccgtggccggagctgcatgagacgactggtgatctgaatgaatgccggctatttaagtcaacaaatctgctattcaagtccacaaattaacaacctgtcatgcaaatgatcaccaaatccgtaattatgtccaaaaacacacctcgtatcacggaaatcaccaaatatatgctactagtactattcaagtcccagctgtagattttgaacagtaacttaaattccacattcgtctttgcctctcgcgggtaccgagcccgacaaataaaagcagaaggaatttaatctttcctttgtaccactgtgccgtcgacctgccagccacaggttgcagctgcctataaaatagacagacggcaagttgtacacacatatccaggggcgcgcacagtgaaggccgcggccgcgctgctgttcgatacacacaatcggcggcgacatggcattggcagccaagctcctcccgtccatcgtcgcgttcgtggctctcgcctgctgcgtcctccgctcatccgtcgcgtccgtcgaccaccaccggaagctctccggctggtccatcggcggcgcgacgtggtatggccctgccaacggctctggaaccgatggtacatctacctcacggactcgatcgatcatcaccagaggatggaccatatatgcgagcggcctgcaggcttaattagtactgacgaggcgtgctgcatgttgatgtaggtggcgcgtgtgggtaccagggagacgtcgggcagccgcctttcaactccatgatcgccgccggcagcccgtccatctatgagtccggcaagggctgcggctcttgttaccaggttcgatcgttcaattcgtctcgccagctgatatatcttttaatactcttttgttgctttccaagaataagacagtcaactctaacgtttactcgtttgtttgctactcctactgccaatttgggaattaaattctgcaggtgaagtgcagcggcaacccctcttgctccggcaagcctgtgaccgtcgtcctcaccgacctgtgccccggcggcgcgtgcctcgaagagcccgtccacttcgacctgagcgggacggcgttcggcgccatggcaaaacccggccaggacgatcagctccgcaacgccggcaagctcccagtccaatacgctaggtaatcaagatatctatctctatccatctgtatatctctatctagatcaatcaatcccatatatatcctacagctatagctagcaacagtcgatcaagtgtgcgtagtatatctcgcattgtcacatgcatttaaacgcatccgggacaatttctttgggctgcttgtcacgacgcacgcaaaccacggggcccgtgcatgcatggcagccgtcgtgaaccggtcgaccaactgtgtgatctcttcctctcgatcgtccgtgatcgatctacatgcatgctaccgtgtgtgcagggtgccgtgcaaatggcagggggtggacatcgcgttccgggtggacgccggctccaaccagtactacctcgccgtgctggtcgaggacgaggacggcgacggcgacctgtcggcggtggacctcatgcagagcggcggcagcggcggcggcggatcttgggcggcgatgcagcagtcgtggggcgcggtgtggaagtacaactccgggccggcgccgctgcaggcgccgatgtccatccgcctcacgtccggctccggccggacgctcgtcgccagcaacgtcatccccgccgggtggcagcccggcggcacgtaccggtccatcgtgaacttcaggagggaggattgatgagatgatatgtaggggatatgtagggtggtggtcgcacgcgcgcgcatgcacggtacaacggccggcggcgtacgtggcgctagcttagtttaattatgcttggagctatgtatatcagggcacaagtggtttgtgtgcgccattgttgcgcgtggagtgatggagctctctgtcagctcgatcgactgtggtagaagaataaacagatccttcagctaagctatttgccacagttgggcacttgggcgttggctccggtccatgtaccgatcagccagcgtggtccggggctccgggccgtcgcgggggataacgcgacttgtgctggcttccgcggttccacctacgcacttcgttcggtggaaaaagtcctttttatttttctcaactaaagttttagtttgattcgcatccatggacagcaaaatcagatagagaggctaccttaacaatcaaaattgactcattttatcttttcgagtgatttaggtaacggttttttcctacatgacacattgaactagagaaatttaaaatgatctatgaaggaaatcatgacggccatggtggcagcgccacggcaatcgagctcgagataggagaaatgatgccacgggtggattgagtgtccaatggctgcgagtatgatacacgtcgaattattgtctttgttggagacctctagagagcgagctccgccccctcctagccgttggtcatctcgacgcttgagctcatccccctcgccatcagccagcctccccaactctttccttcccttcatgccgtagtagacttcgaggagcgctgctgtaggattgagcttgacaagaaggcagcggggttatgggacatgcggatctgagctcgccgaggtggggtggcgaattcgagagcctcccttttgtgccgatggtacatggcatgatgtatcttgaggtggggacacggccaacggtgacggagtgacacgtagaggtgttggtgacgcgacatgccacaaggatgccaccagctgggatggcatgagctcacgatgtcgttgcttcctcatgggggttgaggggatatggaagaaggggaggcaaagagattgatatgggagataccacattgactttattattattattatttgacaaggatgtcatgtaggataaaattactgttaaaagcctctaggattgaaccagttttaagagttaagaggtgctttatatctattttttttggttcggggacgaaaattagattgggcttactcttgtgggatgcaaaatagacattttccttgtttggtgaaccgtgagcctttggagcctagcgttgcaaccgtgatggcagagccggagccaacgcccaacggcctactgagaaactcttcgcgagcttgggccacgcccgcaggtctatgcagttgtacggctaagctacgcgtttccacgtccacgttgtgcccggctaatttcagcctggaaagcagcccgctcaccgagtcaggtgggttcagatgcgtggtattttggcccaaccgtaggcctctttcatagtcgcatcgaagtatcaagtatcgaacccaacttctagtttagtttgttgagcagatgacgaactccttttaatggtatcagtgaacaggtagtttcaggaatcaacagaggtagctgcagcgttagctctgtaccgtgttgtacagggcggcagttgctgcctgcatgtggtgttgaggtcatgaggaccttctgcttctcactgattgtgtttcatcaagagaaaaaaaggtatcagttcccaccttgattaattgagtgtgatgaaagtctctctttagaggaaaatggacagcacatttgaaggtgggcctctaggaaatggacagcacagtggtggccttggttggtgctttacaaatgctctgctgggcgcgcgcctgggccttgtgaggcttttgtggcttggcaatagtacacttgcctccctaaactgttttaccgaagcaatcaactgcaacgacctccaactactaaagcaggttcactttcacctctagaaatatttttgtttccctaaatactggttgcgatttcaccttgacttttttagggtaatatattgcaccatatacagtggagaacacaactttaaaatatagatggggcgaagaacggagatgttcactcgataagagcaatcgaacacaacagatgtggtagttatagttcaattgcataattacctcgatcattatttgtggcctgcatgtgttgtgaagagacaaactaattattagatgttcacaccttattatatctaattttgatggcctataactactataaggggtagtgggtcttggaggtgtggggtgatacgggtagtagctgggacggtcgacccactctgactaatgggtaaatccacccctgatcatatactaggtgtgtttggtaatttttgggaaggggagatagagtttagagaggggagttgatgatgtgattgatcatatgtgtttgctattttactctaagtctcttgtttgccgaaacaaactttggtcgttgatagttttttttatggaaattgtattttaagtgacgatggacgtcttaaaacttaactagcttcgctcatgagggaatctcctctcaattttcactcattataagtgagaatcacctataagcatttgatatccctaaagaaaaggtatgctccctctctttcaatataaatgcaacttagcatagacatgacatatctcagaaatacgaatctagacagtattgggacaaagggaggaggagggagtattgtctataagcatgcggacatgggctttgagcctttgaacaagggacaaatttctgatatcaaaatgcattatatgtacacaccaataaaggatggtgtttggaattttcctctatatccagagcaggtgccatattggaataagccaaatcccccttgcaaaaaaaaggactaacctaaaatccatgtatctcgtgcgtggaaaatagattcctagatgccaaaaccattctctattattaaaccccccacaacaatcaaaacaccaaacgggaatcatgatcaacttgcgaggtcaacacacccaatgatccatctcaggaaaataaagaatttagagcaaaaaaacaaagaaagcgtcggcagaggcagcagctttatcacaaatatgcatgtactacgtatatcagctatcttatcgccattcgccaataataatctcgttcgttattcccgtatttcccctcgttgttttctcggggaaacaggcgtcgtgcgcgcgtgggacgtgggcgccatctgcagcacccacccaccagcaggaagtcgtccaccggcgtggaacgctccaggtttcggctgggcgacgcacgccgcggagccaaaaaaaccaacgcgcgcgccgcgcgcctgctggggagtacggcggcaaggcgtgagaccacgcgcggggcgatgagaactttcggcccgggtttcggctgccgcgcgcggcgacgaacgggcgagtttagccggtagagcctgacccctgtcggtggacggtggtgaggcaccgggtacacgtgccggcgccagcgccaagatcggcggggagctactacccctgattattcctcgattcacggcttggacatgggctttgtcaaccgtcaacaagtgatgactcatgatcactggccttttttgagcttctagtaaattaaaaaggctcactgaggcgtgcgtaacagcgacagtgcaccgtgatttatagctttggctactgtggacgcgtgtgatttagatagaccgacttgcggcgatgtttggatcccatgtgcaattggtccggcattcgtattaagaacttcagtacagtagtaagttcagtagcgtctaggaatgcgagcaccatagcgcttcactttctgccaaaaacacactactccagattttagggagaaacgatcagataatatatgccgatggacgtcggtggccgggttcgagtccggggccgattaaatcaactgcaactaacgtgcttccgagtcagagattacggacggaggagaagtactactaatcagcgtgctccgacacgatcgaactgaagaaaagaagagagaacgcagaggagccccatgtgccactgcttaaacaagcaggcgcccctacatacacgtgtctcggatcggacaccaactgacaaccccacggctagctccacgaggcacacgatcctgcccgtctactcgtcagagactagtaacgtgggccccacgccaacggtcaactaattaacggccggttcggttttctttactgtgtttgccacttgctcctgcgtgtgttcctcccttattttagcagaaagatcacctgctccagtaggataaaaagaagaggttcgattagaccctagacaggcatgattgatgattccaaccttgtttgccaataaaaaaactgcgtgattgcataaaagctagtagccaatttaatttcttggataaattgaacagtttagtttgtttaaaaccattgaaaaaaaatcaataattcctagtttcggtcactatgtgtttccaaatatcaaaagatagagatagccatttaggacgatgctagaaaaattgatagcctaagaacaaatcaatgtattttagttagacataattttctctctcacaaaatattcatataattttaaaggatttgaaggggatttttggagtcagcctaggactaagccctaatttccctagcttgtagctccacccttagagatcaccaaggaagatgtcgttgccttttcacatcctgcatttcagtgtcctcgctagtgttgaagtaaagaagacatggttttcatgttgctaagggctgatttagtttgaagacaaaacttgccataccaaaatattggcattttaaacgtaattttgttaatgtttagtttgctacgaatacttgtcaataccacacaaatgttgccaaaatattggcattggcaaaaaacttccacatgatttggcattgccaatagtttggtatggttgcaaactaaacaagccctaaatctctatcagtgtctaccgtattcttaaggtactcaatgaagacttacgaagtattttctatcaagttattcatgataattagcggtgatgaccgatcagtagtatttggtagttagtacaagtcactaatttgttgtgtgatattggtatacgtgatgaaaagttaagaggaacgatgatggtggcaatgctcgttttttattaatattataagtgcgggagttgattaatatcgtgtttacgctcgtctatttatatctcttatggtatggtgttttagaatatagagttcttttctatttcgatagatctttcatatttcttagttgtaggaatagagttgttattacttctcttgttgtatatataggccccgttcgtttcctctgaaaagaatggataaagttttggattttcgtggcacgtttttcaaactgctaaacggtgcgtttcgtgcgaaaattttctatatgaaagttgttctaaaatatcatattaatttattttcaagtttgtaataattaaaactcaattaatcacacgttattactacctcgttttgcgtgaaacacttgtttaggagattcaaacaccatcataatctatcatagtggaaaaagtaaaaaaaaataatcaaagtttgtaacgactaaatacgaacaggagcaattgaaacgagctactgcaactgccgccttttctgtaagaataccgcaactgctgtcgtcttccgtttagcaacaaccgttttaattcaaatttacctttttccgagaacagctcgaaagcacatagcgtatcggcggttgcttgatactcacaaagtcacaagtacagccacatttcggctacagaatctgatccaaaggcagatacagagcgtatgcacgtatgcgtgcatgtggctgtggggtcgcctcaactactaagaaatcgaaaggtgtggatgattagagctctctccattattacaggattagctatttcatccactaattaattgctcttatttgacgcgcacacgtagaagttcagaaggtcagaatacaattagtttctgaacatctcttgttcttctgaagtctgaactgtactgctcatgcgtgcacataatgcagcttcttcccccaaacacctcaaaagctctgtttaactatgcagcacgatatatatgattatgctctttgccacgaaaaggggtgcgtcgcatcgaccggtcacatggcacaggacgacagggatcaaattattcggcaaatggcggcagtgcaaagctcaaaacgcagcaatccgaaaaaacattctcctgtgcaggctggcacaggaatggatgaatgatcgatcgttgcattttgggggtcacatcgctcgtgcatgacaggtaaggtgtggtggtaaggccggccatcctgcatgatcagcagagagagagagagagagagagagagagagagagagagagagagagagagagagagagagagagagagagagagagagctaaagattgatgaacatttgggaaaggaatggattcgaagatgatgttcagtagacagtaaaccaattgttaaatcgtgtgcgtttgagaaaggtttgggccagagatgttcgccaattcttggtttttttttatgcgtgctatcctaaccgccgagggcaactacctcgtgagatttcgttttctttatcatgatttgggcgttggagaacgtgatcacctacattatcaaagaggatggcctctgactccttccattttgtgttatactactaaccggtagcaacaatatgatcatgcatatgggattatcctatcgcccaaaagaaaatcatgagaccgatcgaccgatcaatcctccccaaattcgtcctcaaatcgcgtgtgatttacttcattgttgttttgtttacttcgcttttttgtttttaaaactaaagcttgatctgacattgatgacattagtgatctccggggccgtaaataaataaactcggagattcaactcatgatacacctgaactattagcagttagcttcctgacttctagcacttccatcatttgagtttgtttacttaagtctttgtgtagaggtcttgcacaaattgccatcactctcactcttaactttttttatttttttagaaaagttttaaaataaataaagtcaacaaagtaattatataatctccaaatgcacccctgaaagattcttacataattcttacaaacaaactcttaattgttggatgtaattatatgggagttaaattaaatctagattttagtcgatgtatagagatcacatcattgtttgtaaggtttttgtaagaaaaaacattgtacatatagccttttccttacatataattttgttaatattatgtacgcattccttaattagaaattaacatatgtacataaaacaacaactttaggatactatccctaataccctataacaattttattttattcatttattcacatttgacaactagaattataccagtgggtaaagaccaatgatataatagctattaggagctccgataaattgaaacattaggatcgctatatacatcataattgaaaagttaatgaaaaattcttccttggttttgggccaaatactattcattccttcctttctagccccaacctagtacactaccacccttcgctcggtctgtctcttttcgatccagcaggcccaacttgcacaaccggctaataaatatatttaatgtaattgtgctgcgtgtgcgtgtggtggatcgaatcagaaaaaaaaaatcagaagcctaaaaaaactggacggacagaaaaaccccgaaaactttatgtatcttttaattagttatattatagatgtaagaaatggttatctttcatgcagcttgtgtaatgacttgtatctctttcatgagagatgactcctcatatttctcttacatctcgtcatttgaatcaacatggcagtcttggaactaatacttactcgccactccatcgtgggcacttaattagccaaaatgaccacttttaaaataagttttagatgcattttttttctaaaaaaagttttagaaatggaaatttgcctgcataccttgagatttgggatagcttaagtccctggcaaacgcaggaaatttaaccaaaaaacaatatcatgccaacttcgggagcaacgtactactgtacatagatcaattctttacttatgaatggtatatataaaattgaactaggcgagatgcatggtttcagatttgactgttcttgaaaccgatcagacttgactgttagttgtgaagttttccctgtgttccaattacaagtagacactagctaatctaatactaacagtagcatccctcttggttgttctgtagtgtactgaaaactaatacaacaatgctactagtgcctgataagttgatcttcgaacaatgtgcgcttatagcaggtacatactctgagattgaatttctcaacttgtgttatcccaattgtacttcaccaatccacttccttacaagaaattcagctcgccttattttgtaggtactggatactgatcgaaaatcaacaacagttcgtttagcctttttccctacaccaacttgtcacgttctcaccaataattctcgaccggcagaatccctaaatttcttgccacgtacgtctgcatccctccaaaaattccctataaataccccttctcggccactccctgcaactcacccaagaacacactcgagctgagcacgtctagctagctatatctctcaacatcttccgagctactactagtagctagctagctagaggaagcagcagcaatggcgaaatcttgcaccttggtactactacttgtcgcactggtcgggctctcacttcttgtgagccccattgcttgctcccgcaagctcagcaagccgaaacccaagccgaagccgagcatgaagaagccggtggtccgggctcacaacaactacaccggtagcccgtcggtgacggtcaccaccggctgggccgccgccggcgccacgtactacggcgcccccaacggcgacggcagcgacggttagtgctcgcttgctttcgctttcgagcttacagtacttgcattgcacggcattggtcgagctggaactgaaattaaaatggaatcgggggaaaacttgcaggcggcgcttgcggctaccagaccgccgtcgggcagcggccgttctcgtcgatgatcgccgccgggagcccgtcgctgtacaagggaggcaaggggtgcggcgcgtgctatgaggtcagcacacacacacgacactgacacatgtacacacagcagtgtgtggtcacacgggcgagctagctattactgctgcgagagctttcgtgtagctccattaatggcggaaagtggtcggctgatcccaactcaatgcgttcatgtggccgtgtacgcaggttaaatgcacgaccaacgcagcttgctccggccagccagccaccgtcgtcatcaccgacgagtgccccgggggcatctgcctcgccggcgccgcgcacttcgacatgagcggcacttccatgggcgccatggccaagcccggcatggccgacaagctccgcgccgccggtatcctccaggtccagtacagaaggtatatgcacattcgcatcagtgcagaatcacgaatcaatggcgccggcaagctgtagtataattagctaaccttggtgcttaattccgttaatctctcgtagggtgccatgcaagtacagcggcgtgaacatcgcgttcagggttgaccagggggcaaacccgttctacttcgaggtgctcatcgagttcgaggacggcgacggcgacctcaacgccgtcgacctgatggaggccggctgcggctggacgccgatggtgcagaactggggcgcgctctggcggtacaactccaacaccggcaaggccctgaaggcgccattctcgctccgcctcacctccgactccggcaaggtgctcgtcgcaaacaacgtcatcccggcgagctggaagcccggcgtgacgtaccgctccctggtgaactactcctaaattaattacagctctctccacatctcctgcaagaagctgcagtgcagagttgcggtaaattggtaattacagatttataattagcctcgggttaattatatggcgggaaatgtgcgtccgggtgttgcgagaggcggtgtcagaagaggaggaaaggaggtttaagaatcgtgttcttccctccacggtctctgcattcccctagtgatgtgactgtgtcgtcgtcgatttgtctgtaaaattttatttttcttagttatatcttcctctgttattgtcatgttgagggagaagcttgagctgcaactaatgttgcatgccgatgtatcaagtttgtgtgtgtgtgttttttttgtaccacgcaaatctttcagataaatggattagtactgtcagaagatttctgtacttcactggaactcatgcattgttgtcgttctgtctcaagttcaattctcgcttttaggctgtgtttggttcctttcaaggttggaagtttggattgaaattggtacgatattactgaaaagttgtgtgtgtatgattggttgatgtgatgaaaaaagttgaaagtttgtatccaaagtttggatctaaacacagccttactgagcagggtctgtgatctctgaagtactgctccctccgtccaaaaaaaactcaatcctagatttgaaactgaacacattggtttttttttttaacggagggagtatgtcctagttgcagttcgaatccctgaacaatcaaccagtaatttgaactggagtagcacaagatagatgctgtacaaagaaaatactggacgtgcattttggtgtaaatcatcagcgcgctgtttctgtgtcctcctttttttcttttcgctgaaacctaatactcccaaacagcataaactccaatgctgcattatccgcccgcacattgcaaagtactactgtagtataagttgtgctataaattttgctctcctgttatgctgggttcctgccgacgaagacacatgcagttctcatcgaaagtagacaaaagtgcagagtcttgaatgttacacacactgattgtactcaattattagtagtttaagacacgaactggttttcaatggaattattaatgcatggagtacacttgtgctcctctacataccggagcttcgcttgtcctcggcattatgaactggaaactgagaaaagtcgtctagtttgtcatgtgggtctgacaaatgaagattatatataccaggagcgacgaccatggatttcgattcagaaagtttttttttctaaaaaaaactctgcctatttctgcacgagtgtgcagattaatattgtacagtacccgccgtcatatggatacagatttttattttaccacttagtttatgtcatttgatctacttaattccactagcattcaatttcttatttgaaacgtgccgctggttgcatggattaaaaataaatctcaaaattcaactagcaaccaattgcctgccccagatttaccggaaagggatacccacatgttagtgctcaactgcacatccagttttaccatgatctctacgtagtagaaattactttaaaccattatctttttttttctgatacaatgaaacgtatatttggtactagcatcttgactttttggttgtagaatatctttttccacaagcactgataatagaactaataaatcaataattgagtttgcttttaatcgtgacaatattagtagagaacaccgtaaaaataagtatgtaaaaaatagataaatttcgataacatacgtgtgtcgtggatatggattttcataccttgatgggatctccacccgttacttgtatgtcacctaaatatttatcaaaaaattgaaaaacattgataacatatgttaatatgaaatatatcagtgcacaaacatacaataccaaatttgacttctacaagttaaagcaaaaaaaaaaaggtttaaccaaaaatagttatcatacattcgcagctatatttgttatttttcttacatcttacagaaattgaattgtaatatatttaatattaatctatcttgtcaatttattttaaatctgtaatgactatttaaatagcatttacggaactagaggatatcacctatcctcttgaagaataaatacactttcccgtgtgttgttggtatatttctgctcgcagaatgcaaaccacatccgatgctaacaaccaatcacggcctaacaaactagtagtgcggagtacgtgccaacattttgatatggcatagtctcagccagcaagcaaaaaatctgcgcttgtctcctttttctcgttttaatgcatcacatggcagaaagtgaccgtgcgtaaatcattcataactaggagtaggctatttcaagaccttcaattgctcacagtacaacgatctagcggcggtgatacgaaagagaccaccatctatggcacatagctctctttcccaagaagaagaacatgctgcagacctgacctgcaacctgcattcaggtgcggctcgcgcgagtggtcgatgtcaaaagacgctacctagtcactgtcaggatccatcgcgatcctccatggctgcgctccatgtgcccgccaagcgcacacgacaacgatctggatgaaaataataatcgctctcgaaacggcacagtgtacgagcggaaaaccgatcgagagctcccccatgctctgaccgctcgcatgttccgctcccccgttctgtctcccttcccctcccccctgctaataatctcggcgtcgatggatcgatcggttggtctgtgcgtttcacagtccgtgtagccgcctccggccaccaccaccatcaccaaccaaccaaccaaacaaccgagcgagcgatcgtgcaggcggcgtagcgtgaggtgaggtgagcagcgcgcgcgcgcgcgcgcgcgttccccaccgtgtcagtcgcgggcgcatgtggagagattctccggtgacgggagggtgaaagactgaaagcaacgggcgcacatggcggtggtgctgtgcatgcatgcgacgcgcgcgcgaccccgcccgcggccacggttcggctgattttgttgggtattcgcccctattcgaccgaggggtggtcaaaactcaaaaccccgcgaacatgttaattggcagcatcgaaatttctaatctgtcctgtccttccatacatctaccctggattcggatcaggccactttggcagtacccaatcatccagccatccagcacacgagagatggcccagatttaaccgtgtcatacatcattttagctatttgaacaagcatagaacagtttcagttcagattttgcctgcaatttctctccctttgatctgaattttcttgaactttaagacaacccaaatattgttaaagaaaagtagacacatacttcatttcattatattgaacttcataatatcttgcacgcataattgacaaaatgagctagagtttaagcccttgtttagtttccaaaatattttttccaaaaacgtcacatcgaatctttggaaacatgtatgacgtattaaatatagataaataaaaaaaagtaattgcacagtttacatagaaattgcgagacgaatcttttgagcttatctttgatcttatttttctattataatatataaaataaataaatgtatatttacttttattatggtgttttgaaagacaaatttatatatgttgtcctttaaactaaatatttttaaaattattgatggtcaaagttataaaagtttggcctcaaccttatctaaaacgtcaaataatatggaaccggatggagtacatgatagctataagtgatacagtaacccatatgtgctaatcacggattaattaggcttaataaattcgtctcacggtttccaggtgagttatgaaattagttttttcattcgtgtccgaaaaccccttccgacatatggtcaaacgctcgatgtgacactcaaaaaatttcttttcgtgaactaaacacaccctaactattttcgcttaaattgggtgtcatgcatccactgacacaaaagctttcaaaatcaactagctatgctactgctagattaacccagttacaaaaattttcatgatccaaaagtagatcatcatttgcttccaaaatcagtacgatgccttctaagttctattgacctcttcaaatgaacttttaagataagatgacatcttcaatattaatagaaccctagggaaaaaaagataatatccaaattaattgcgtgtgatgtgcagcagtaggaggtaaagtatgcttcccatggtagaattggcgccaatttttacttccctctcagacttttccctccaaaacacatctgctcgagtcagagagtagttgaatagctgggggaaattaagcaacgaatctagaccatcccttgtatgctggatggttagatgatggatactgctaaagttacatgatccgaatccatctacccctggcttctcatttcacacggcaaatgaaaacagtatatattattgtcctgtgcgtgcagcgtgcgtacgtgtctcactcttgttggtgtttatttaccggcgtccgtcgccctggtcccgacgtagtacgtggtgttatgttaacaggcggccgaatgtcgggggtgattcgtcccctaacctgccactgacaaacaacatggcagtagaatcgcagcaggtacactggtactggttacagcaacagttttttttttaacaaggctttccagtttccacatgcgtgtgtaacttctttgtaacatccagtgtgagtgccggcgcgtctttacatacatatacatacattatacatgcacatacgtacatatacgtgtcgtgaatgggcaggatctcttagggtgtgtttgaggagaagggaattgaggagattggggagttacgcaaaatgatgtgagccattagctcatgattaattgagtattaactattttaaattttaaaaatggattaatataataaagcaattttcatataaaattttttttataaaaatgcaccgtttagtagtttaaaaatcgtgcacgcggaaaacgagaatcaatctcccctatctcccgagacgaacagagccttaatttactcatgctgctgctgctgcgtgtgctgctggtgtacttggcccaacgccgacggttgcaactgtgcgtaggagtggtgtggagtggaatgagtggcttggagtggattgatgcgatggcggggcacccgggggaccgtcgaatgcataactgtaacaacagttgagagcctatggctaccgaacttttttaatggatcggcgtcgctccttttgggtttattttggaccttggccggccggcctgggcctaccgttttgcggtgcccccatgtgaagcgagtaaattaaacaagcggacaagtggagagattttggttgcaggcgacgatgtgacgccttcgtttggccacctagctcactgcacgcgccatggaagacgaaggtctgtgtgctctgtgtgcgtggagggttcgggtggttctactggcggagaccacatcgagcactccagtccgactgactgtgtggcttcagtaattaattaccagtagaatccaatatgccatgtaggattgcttgcctttaaaagtcttggttgcaataagcttcacagatctacagtgccctgcatatatacacagcttgtttagtttgtactaacacttttaacctttggtatgacaataaccaacattgctatcctactaaaatttatgtagtttcggaagttttcactcttaaaacctcaaaaaaaattgatgatggtataaaccaaatccatctcatcacatataaaaaatttgacatcaccaatttttgctagggttagtttgaacaataaaacaaacatacttggtgacatttgaaattattaactcgattacaatgttttttttaagaaacattgtacaaacacaaagctttcacaacatgcgcaggtgcgcgcacattattccgagtatcttcgaaagactgaaccgatatatctagagattgataaagtcaacataagcacctcattatcaacggttacgacgcctaccactaaaaaaataatttaccataaatacgagtactcgtgccaagtctagaattttagcccaagtgggctagttacactacaagaatctactagtagagctacttgattacaatgttaggtcctttttggcatagctgtggatccaagatttttggagctggatatttctagattaacaaatctatggatttaatatagtttgttgataacatttatataaattattttgtgctcatttcaaataaattttaaattttaagcactataatttagcatataaacttcaaatgtactatggatatgagatctaaagccgtactaaatagagtgattggaaaaaaaaactttacaaataacaaacagtttggaatacgtggcataaactatgtagtagaagattttttttctctttcataataactagctgggtggcccgcgcaattacgcggctagcacccaaataaaatcatatatttttttcagtatgatttcacttaagatttattaaatagctatctcattgtcttaagactttgaaagaccaaaccttatcatcctcgtgtttctaattatatagtttttaaaagtcacaccagttgctacctgttatgtcatctccttctttattttcttgctcgatctaccactatttctatccattcttctttttatagtttttagagtttattgtcacgttgggtttcgtttttataatttctagatgtcccgtcaaatgttgccattatactcctctacggcccgtccactgtctcttctctttattgttattgagattttaaaaattgaacataattatcgtttgggttcatttttactttctagaagtcccgccaaatcgtcaacggctttgccattgtactcctctacggctcgcccgctgcctcccttctttattgtcattgagatttttaaattgaacatgattatcattttttttaccttttagaagttacaaacctttaaaaattggacttgtagtttcattattttttataatttttataagtcctatcaaacgatgccactacgcacctcaacatcccatccgccacctactctttattgtcattgtgattctaaaaattaaacataactatcattggaattcattttttattttctagaagtctcgtcaaccgtcgatggctctgcaactatactcttatacaccccacacgctgcttctcctttttattgtcattgagattttaaaaattgaaatgattatcaatggggtttaatttttttacttataaaagtcccggcaaccgtcttacttgtttgcttcacggcttgcctgacatccctccttttaatcgtcattaggattctatttcatgttttattaacaatttttatatgtcgtatcaaccgccaccactctactcctttataggcatgttacttaatttatctcgtcatgtgttttagatggttttttctttcaatagtctttatttttatcacaaattttagttatttataaattgtattcctaattgaaatcttatttttctttttctaatttcagaatttatttttttaaaaaaatagttaataccgtattgtgttcttttaatgtttttattttttattttcaatttcagttgtttcaaaattgtatttctacctgaactctcttttattttttttttctaatttttgatattattttatttttattctaaattttaattaatctcgtattgggttcttatatggattcttctttcaatattgtttatttttaattccgaattttagctaattttaaattgtatttctacttgaactcttattttattttctttttataattttggatttatttttatttcaaattttgattaatctcgtattgggttcttatatggaaacttctctaaatattccttattttaaattccgaatttcaactatttttaaattgtacttctacttggactctccttttcctttttttctttttctccgattaatatgggaatttttagcctccacagcgaacgtggtgcctcctttcaaaactgttttaataatataactagctggatggcccgcgcaattgcgcggctagcacctaaacaaaatcatatattttttatatgattttacttaaaatttattagatagctatcttattgtcttaagactttgaaagaccaacccttattatcctcgtgtttctaattatatagtttttaaaagtcacaccagttgctaccccttatgtcatctcgttctttatttgcttgctcaatataccactatttctttttattcttcttggaacctttaaaaattggattttatagtttctagggtttattgtcatgttgggtttcatttttataatttctagatgtcccgtcaaacgttgccattatactcctctacggcccgtctaatgcctcttctctttattgtcattgagattttaaaaatcgaacataattattgtctgggttcaattttactttctagaagttccgccaaaccgtctatggctttgccattgtactcctctatagctcgcctgctgcctgctgccttccttctttattttcattgagattttaaaatcgaacatgattattagtggtttttttttttactttttagaagtttcgaacctttaaaaattggacttgtagttccattttttataatttttagaagtcccatcaaacgatgccactatgcccctctatagcccgtttgccgtctactgtttattgtcattgtgattctaaaaatcgaacatcaatatcgttggaattcattttttattttctagaagtcctgtcagccgtcggcggctctgcaactatactcttatgtaccccgcccgctgcttctcctttttattgtctttgagatttaaaaatcgaatatgattatcaatggggtttgtttttttttactttctagaagtcccggtaaccgccttactcgtttgcttcatggcctgcctgacgtccctccttttaattgtcattaggattctatttggtgttttattaataatttttatatgtcgtatcaaccgccaccactctactcttttatatgcatgttacttaatttatctcgtcatgtgttttagatggtcttttatttcaataatatttatttttatcaaaaattttagttatttataaattgtattcctaattgaaatcttatttttctttttctaatttcagaatttttttttaaaaaaattagttattaccgtattgtgttcttttaatgtttttattttttattttcaatttcagttgtttcaaaattgtattcctacttgaactctcttttaaattttctaattttggatattattttattttttatcctaaattttaattaatctcgtattgggttcttatatggattcttctttaaatattgcttatttttaattccgaatttcagctaattttaaattatattcctacttgaactcttcttttattttcttttgctaatttcggatttatttatttttattccaaatttttattaatctcatattgagttcttatatgcactcttcttttaatattccttattaatctcatattttttttattaatctcatactgtgtctatatgaattattcttctaatatttcttattttttattcctaatttcagttgtttgtaaaatttatttttacttgaactcttatatttgatttttctagtttctaaatctattttattttttattacggatttcaattaatctttaattgtgttctatatgaactcttctttcattttttattgtgttatttcaaaatcaaataaaaatccgtgcacatgccatcatgcttttctggttgctgacgtgtgcatcacccaaatacggctcactgtgcagccgcacggcttgacccgctgcttcggatttccatcgctcgccgttagcatctatcttcatattaacaaaaacgcatccaaattacggttctacagtggttcgttgcccgctgctttatttatatatgtatattatagcctaattcatctctaactttggttaattggtttaggaaatcggacaaaactcttttgagtccgtttgcatataaaggtcctagctagagattgattctaattctacacgcgtactgtactccgtatctcttaattaacatgccaagtttatcttaaatctcagacattgaaatctatgcctcttacaatccaacggtataaataattcatattttcttcgattaacgtgggaatttctagcctccacggtgaacgtggtgtctttttttcgagctgtattaataatataatagataaatcgtattaatcgaagagtggagtaaataatccaatccgttacaacaatccgatggctaagcttaaaaggaggagcgtataactggactgaacgaccgctggtgtggcgtgtgttgttcctcgctctcctgagagtcctaagtcctgacccagattggaaccgggattattcacagtgagggtcatcagcggatcagcctgttgtttttttggctcaaaattttctcggatttttggcgttccgatacgtcaagcaagaggcccagatgtcgtcatgtgcgtgacgacgaaaggcagcgaacctgcggagcacccggttccgcgatgcgtgcgccgtatatgggcccggtttattcgccatcctattgggccggaccagtacagcccgaactgccctataacataacaagcacatatctatctcctcatggattgagggcctgcttggtacagctccaactcctaaatttagctctaggagttgggtctggagtggagttgtggagctgcctaaacccagctccacaactctagttcattttgtgagagagctccacccagctccactcccagttttggtggagctgaaactgtttggctgagctccagctccaggaggggtggagttggagctggagctgtgccaaacatgccctgaggtgtgaagactgaagagggagggcacccctgaattaataatcccttctgctccggatctgatttcagtaccaatcagcaaaacaacaatctgttggtctgaagatggattctcaggctgttcgctcatgagaatgctaattcacgcgcgtgttgccggcgcgtactcccggcccacgcacgtgtttcttttctttttttcgctaacctaccgccatttcttttttttctttttttttctttctttgcagtttgatgccatatgggtaggagaaaaaaaccgtaattagtttaatagccattagtttcctattttttacaagtgattagtttactagtaaattttaaatctgaatgtaaaatttttaattttggacttgaaagttttcaaatctcgagttgaaaattttcaaacctgggattgaaagttttcgaatcttgagttgaaagttttcaaatctcgagttaaaaattttcaaacatcaagttgaaagttttcaaattttcaaatctggacttgaaagtttttgaatctcgagttgaaagttttcgaatctgagttgaaagttttcaaaatttgactttaaaatttaaatattaagtcgaaagttttcaaatctaacttaattttttaatctattagtaaaaaaaaatctccgaaaaaaaatcttcacaattttttcaaattactgtcattagcgttaacgcggaagtgcgtgccgcacacgccagctagcttcccccgttcgctcaggccctgttcttttctgattaagattttgattttaactcagttttcggtagcacacgccttttaaattgctaagcgatatattctgtgcaaaaattatctaaatataagttaatttaaaatatcgaatatatctatttatcaagtttataataattgaagtaaattaatcatgtgttaataactttctcattttacgtgcaaccacttaatcttcatcttcactcaatgtctcgctgaagtagaactgtagagaactagaaattcgtcatatttgtcccagttccaattgaactcagtagctcatttgctcccaggccacagggccatttcggagtagctggtctccctgagtatttttgagtcggtgaactgcagagatggatggtcatggtctggcatgcatataatactctctcttaatccctgaatacgatacgatctcatcagagacagtggagctcatgtgttgatttaccaaaattagttttctgtggtgcttgcagctgaaacaggtctcaagtgtcatggaagacatgcatcggaaacaattctcaaatgccatggaagagcaaaatttgctctttgcagcagtagttgttgtgttttcagaggctcagagatgcatcggtgcttaatttgtcaggccctgcttggtggaacggtggcgggaatgctctaggaactttttagcatttagctcaaattcaattagctcttactcctatttcagaacttgaactggtgctctttttcagaattttttttatagctttcatgcttgaaataatcaaatcagttgatcaacagcagtctgactaagtgttgcaacatccattgcacgacttctgccgcttcatcctattcccagcaattttttgcaagacctgaatcctgaatttcagtatgagatctgcacctaccaagctagcaggatatatactctcctacaacaatagaaagtcaaacaagttctgaaaaacaccgtgtttattttggcttttgtcaaaacttcactccagtttactgatcacgctaaggttatagaaggaaatacattttggcaatagaaactagccttacattcgctggtattacatgtcgaacagatggatgcgcaataccagtaaataccgtttgagtcaaaattagttccttcaagagattggaaaactgtgcaatcaacacattttttaaccgaagaaggctgagaacaacatccgtccccaatcatatcctccatttgcaaatattacttgaaacacatgacacagctcctgcatttcctcggtaaaaaaagttaatagagaccttaatcagaatttttaaagtttactatataaaactgacaatgatggtgaatattttcttctgaatctacatgtacaaacaatacacaaaagtaaatcatagttcatcataaataggaggagcaggagcaggagcagcaggtgctgggacaggcacattcttgacttttgctacaacgtcttcagctgatattgagcctgatctgatggcatcggccagcttcctttgcagtgtcaacaggccaatacgtctcgagacaacatatagcaccgccaaggagaaaatgagaaaaccaatggtaaggatgatcctggtaaagaaagccaattagcaattggtacaacccagaaaatagtattaatactaagtattgcaccggcagaaacttgtttggcagataagaaaattggaatcatcaagtaacgtaattggtaaatcaaatgcgcatttggttccacctttttttaaaagagaagagcatttctatctatactcctttaaaaaggaatagtggtggtggtgagtggtgaatctgcaaccaccaccaactccctaactttttaagagatgtatacagaaaataatggtaacaacgaggttaatgataattttcgttgattaaaatcctgttgcaacgcacgggtaatatgctagtatattttcttataaaagactagtggtggtggtgagtctgccctcaccaccaccaacatgtgggcccatgggattggttgaccccacatgagcaatttgattgctctcttcagtgtaccatccatttgaaatttgagcaagacaagaagcttcactcttttacttttgccttttaagatgaagagcattgctttttcacacatgaggcaggatttttttttaccaagagaactcataatcatgttttatgttaaataaatcatcgcatcgcacaagtattttactagtgtttccaaatgaaagtattaagaatgagtaatgcaatatctatgcacaggatcttattggactgtcttgtgtactccttcgaacaaagataattaagagaatgcaccctggccacaccaaatgcattttctgggtcaatgcattttgcagtatcagtctgataagagagaactggccaactgggcgatcctaataaagtcttataagatatgtattttctgcagtagtaggctagattacaacggttaattgccatctaatgaaagatgatctgcaacaaggtgaggagttcatccagaggtggaaaaaaggtgaatggcagttgacacatgcattatgtgaagatgtggtttgtatgatctttattgatcggaaaacataatttttaccgcatggccacatggcccacatcatacatctccaatccatacgaaagattggtggaagatacttacctatcaagaacatcttgccgttgcattgtagatagcaaaccacgagtacgcatcagcaaagagcggtgtccttgatattcaccttcagccttacgaagaacacttgttgattcatctgcataattttaaagttcgcttacaacttcgccttaatagttagaataaaattacaactgcgcctcttggctcttgtacacagatttagttaggaacacaagaaacataccaaatgttgccaaggtatttgcacttctttccacttcctgtaaacatgtatagtagttagattaaaatttaagagcaaaaattcattagcatataaaatatcaattgaaaacaggtgcactaacctggaccatcaactggcgagatcggcggaggctctcggttatactttctgcagccgatgtcatcccagcctttgtcctaaatcattaggtgagttagtatttactattctgcaagcttcaaaatcaaatgtttgttcgattttgacagtacaagactcctgcccatataatagaagcagtaaacaaaacgtttttttagtatagattataaaaagaaatatttaattaaaataacaagtgactgtgtcttctccacatgctatactcacaatgaacaaccatgtaaactgaacatatcatgcaacacgcagagcagccagtttctcaaatattctcaaatatagaattaatggaaaccttgggacaactaacttactgtagattacgcctgcggatggtagattcttctccaccccctagaagaagctccctctagagaaagagcaactagaagtgagagcacattaacttacaaagaaggatgcatcgccgaggcaattaacaatcaagctaatttaccactcttaagaaaaattacacacctcttcttgagcagcttttttaatgtttgcatttgcttgtaagttagcatttctcagcctcatgcgcagcctgcaaacagataccagctgataaaaaaaaaacaaaacaaaatgactagggggattaccagaggggaagtggcctagagaatatcttacttctgatactgttccttccatgactgcagggttgcttggccagactgtacttcttcaaaagtgggtagctgctctgccagaggatcaagtctgcactgtagtgaattgagcaattgcagtgcatcctgtgcagaaccgtttaacctaggaagtgaacttgcttcctctgtcccctttcccatcttcccacatgattcaattgcagcaatgcacccttcaagctgtgcaacagcttgattccattcctcctttaggttctcaacagcttgagtcaccttatccatcctaatatctgaatggaccatcacagacattcactgactaagacaagatttgttaccaaaaatacgaagaaatgggctagattatagtgcaaataggaaaaaaaaatcaacagataagctattctagttgtgcttgtaccctttcacaaaagatagcaaaataagtgactggtacagtagcaaaaaaaaaaaaaagaagcatagcatcaaactatcagtcaatactctcgatggtcttacatttactttgacaagctcaccaatcatttcattgggaccatgaaccatatatgaaccatgaaataacatgtggtctgctttgcaaagactgagagacagatcatttgtacatccaatgacaaatcatcaacatcaagtgtgccctaaaaataaagccaaatgattcatcaagtcctaccaattctacaatggcaacaacatttaacattaaactaccaagttgttcacatgcacaaatcacaaccatagttgattcgatcacagggctggggctgggcgtgcgtgtggtggccaccggccggcaccctacgcctgtggcttgtgggttagaggtggggcatacccaggattttgaggttgggtattcgaaatgggaaggggtgattttttttttataacccaaagcctaatatgtttaatttcatgtagttctaaactactagttggataatatatagtggaggatctaaattcagtactagtcatttcatactttcttaaaaacatatgcactataattatacaaaagaacaattgtacaaagcttcacaaggttcaaaaatcaaagttcaattggtgaaacatatggttataatttctattgttccctagtgatgccctttcgatctacatttactacaactggattcactggcaatcaatcaatcaaccatccatggcttcaaatggaaaagatgttcccaataatcctaaatcacagcaccactgaagcaaacaacaattaccttagggtttctcggcctctcggggtagctcgacggccgacggcagcggctcgaccccgcgacggccaagggcggtggcgcgatcccgcgaccgcgcgaccccgcgacagccgagggcggcgaattgacagcggcgcggtcaacgggcgctgcgcgtgagtgcgaaggggatgtgggggtggggggagggtggcgcttgggagggggaagtgggggatcggggcttagagggatggtctgggaggcggcggaccggcggtgggcggcggacaagggcgcgcggcgaggcggtagcggctcaccggagggaggagaaggggactcaccgtagggaggagggggctcgccggagtaggctgttgtcgtcgccggagggaggtcgctcgtccgcgtctcgtcttctccgtcgaagaaagctcgccggagggagaatgagggggttctctggggaagatggagcgaactcgccggtcggcagtcgccgtcgtctcgcctcgccggagtaagatcgtcggagtcgtcgtccctcgctcgcgtcaatcgcgtgaatggatggagagagaacgaacgcgccgtagacccacccgagaggatcgaaggctcgactaagcgtctggatctagcttcatgggccgatatgagaaatatgggctgctggacttggttttcttggaggaggtttatctgggccaaaactaccctcaattttggcccagaactaccctctgtgtgtttctgcataccgcattttggtcatcttattttcttctgtccacagctggtagtagtactttaccgtactttatcgtactggtatggtactccctccgtagtctaaaataatagattttgacattttacatcaatagtttggtcacttgtcttattaaaaaatttatgcaaatataaaaaaacgaagagttgtaattaaagtaatttggataataaagtaagtcacaaataaaacaaataataattctaatttttttaataagacgaatggtcaaacagtgcaagaaaaatgttaaaatcacttatattaggggggagaagtagtacttttgtccacagctactagtataataacacattttttttagataatggaatataacatcccagccagtataataacacatgaatagtactttataagtggcttatgttttttaatttttctaaaaaaattaaataagacggataattaaagttgaacacggaaactccagattacatttaaatagtacttctgtccacagctactagtataataacacatgaatagtactttataagtgacccatgtttttcaatttttttaaaaaattaaataagacaaatgattaaagttgaatacggagactcaagattacatttaaaatggtacggagggaataactttgccgttaaaaatctaaaaagtttgaccatgttatctgcatgtggagaggagtgacacggggtcacgggccagccgcaactgtcgggttcaaaagatgcgttcgcaagaaagcaaacagattagagtggtggccccgcatgcagtggtaacaactgatcgaaaccacggcatcccgttcaagtagctggtttagctccacggacgcatgcctattctagtgctccactgccactatctttagtagcgccgtgtcgggctcccatatataacgtccctcgccgtctccatttggatttcagcgatcgatctcgaccgcaccggccccgcatgcctgcccactgcccaaataaagcgtcgtcgatcgaccgcgcgcgatcatggcgatggtcgtcgcggggagccatcggccgccgccgccgccgcagtcgctgcggctggtcccgccaccgccgccgcagcctcctcctcctcctctgacgtacaggcaccactgcaaggtgtgcaagaaggggttcatgtgcggtcgcgcgctcggcggccacatgagggcgcacggcatcggcgacgacaacgacacgatggacgacgacgacggccgcgatgatgatcattcgctgtcaccgtgcgatggtggtggcgagccgtcggaggcagccgggagcccgacgacgacgacgacgaaacgtatgtacgcgctgcggaccaatcccgggcggccaaggaactgcaggacatgcgagaactgcgggaaggagttcacgtcgtggaagacgttgctggatcatggcaggtgcggccttgacgaggaggacggtcgcctcgacgtctcgctccgttcgccgccgcttcacgacggtggcgacgaaaacgacggcgaggaggaggaggagggggacgacctcacactggctgcgggcgggtggtcgaaagggaagcgctcgcgccgtgctaaagtgatggccgtcgggaccggctccgtgtccgagctacagctgccggctccgtctaccgaagaggaagacctcgccaactttctcgtgatgctctcttcttcttcgtcatcatcgtcgcgtgttgcacagccagccatcgtcgtcgacgacgcggaccaagagtcctgcgcatcaggtagcaaggacgaggagaggaacaggttcttggtgccgcagccaatctcgatggcagcccccatgatggctcagatgacagtgatcgctccgcaagtggtgccacagcacatctcgaccgtgccacgtggcatgttcgagtgcaaggcatgcaagaaggtgtttacatcgcaccaggctcttggcgggcaccgtgccagccacaagaaggtgaaaggatgcttcgccgcgaagctcgagagcagccgcaacgagactagtcagactcagactcagcagcaacacgtctcagccgctcctcatgacaataccagggccaccacctctcatgtcatcaccagcgatatcagcatggatgcaaacacgatcggtgccagtgctgatgctgacggcaaggcagcggcaagcggcgttggcgcaggtgaaattgtcctcgccggagcttcgtcgacggatatggccatgatgatgtcggtcgaggacttcgcgccgacaccgttggcgccatccgccgtctcaccgttcaagaagaaggggaaggtgcacgagtgctccatctgccaccgggtgttcacgtcggggcaagcgctcggcggccacaagcgatgccactggctgacgtcgggcgcaacggacccgctcacgaagctccagcccgtcgcccaagaccacgccatgatggccgccatgtgccaccagctcacgctcgggcgcccaatattcgaccctaccgaccagcggatactagaccttaacgtgccgacgaacccactggcagaagcggtcgcggccaggcagcagcagcagcagcaggtcgccgctctcaacgacggcgcactctgcctcaacgcggcggcgtcggtgtacctgcagtcctggacagggcacagcaacgggagccacgtgaacaagaccaccgcgacgagcagccgcatcaacgacgcggccggcggcgtgaccacggaggacgatgaagcggacagcacgagcgccaagagagccaagatcggcgacctcaaggacatgaaagtggcaggggagtcgttgccctggctgcaggttggcatcggaatttcatcagagagcaaagaaaagaacactcaagagtgacctggtcatgacaaggaggtcatgccgactaatgaactaagaaattaattaattaattaattagtgctaatctaatccatatatatatatacatattgtaggtgtacgtactatatcaatgctttatgtgatcgggatatatgtatgtgtatatacatccaatgtaagtatttacaagtagggtcaattcatgtgttcctaaaggtttgaggcaacatctagggacgtattgcttgggggactgtaaattaataggctagcaagcttgattctaaaaggtttccttactgtacgattctttgaggagccttgctttttatttttatttttttccttttattttttctattttgtaactaaccgattatttaatttgctgcttccaaaatgtatatatgcaagttgattttgtccttgtgttcactgcaattagacaagctatatgtgtgcctatatatgtttttttcttgcatttctacactatatattactctaaatatacgacgttcttaacttttaaacataatatttagctatacgttttatttaaatttattgtaaacataaaaaaatcacgccagatataaaggatctttaataatgcaaattagtaaagataaaaaaataatgtttaaagtaaactgaatgataaaataagttaaagcaaaataaatgaaacttacttcatagctaattttactgcagatatgcaaatgtataagccattcttaacaaatcaaatcacaataaaataaataatacttaacaaatttcatgtcaaaaagatatattcaaaaatggaggtggtactattctgcgggaggtgaggaacgtcaatttttttattcatatcgccacggtggagaagcttgctgatgttcgttaccagtccagttcgatggtgcatgtaaataggtcgggcaggcgcccgatacttataatatgtatataaagtgtatatatacgtatagacaacgtatatgtataatataaattttatgtatatgtattttttatgtataaaaatatatattcgtataaaaactttgtatatgtatatgtatacttgtattggtataatacaaagtttatatacatatgtattatatcaatataaagtttatgtatgtatatataaataattatatgtataaaaaatattggcgtataaaaatatacacgtatacaaagtttatatacgtacgaattaaaaaaaccgaaaaagactgccacccctctctccgtgcaacacatggctgcgacgcgcgggggaggagcatgcctaattagaattggaactagctaataatctgtcgacagtttttaaggctcaaaactttcaaatttttaaccataggatttgtcatcaacagttgaaatgggtactgttaacagtaaaatttggtaatcccaaagttaccatcggtttagagtcagtatcggcttcaaagttcgagaatcagccgatgggagtcaagtcgccacgatgtcgtgttcttggtggagttggatcaatcaaaggaagcttatctagaagagttcgagttcaagaaagatgcgacatgacagttatctattaattaggcatagtttattagtttccttttatctttaggaaagtgtgtttagtgtccgataaggactttatcttttcctttttagtttctttcttgtccgacaaggactagtatctccctatgggtataaatatgtacacccggggtcattgtaatctatcaatctatcgatcaataatactctcggcgcatcgccaccctcttccctaaggtttttacttatcttccggcggaactttggcacctgacgcagggctgcatcggctttcgatctccagcgaaggggtaagtcctacgttctgtcgggccctggtgaatctgtcggctacgttggtattgttcaaggctgcatcgattcgatctcttggatcgctctggtttggttgatatatttgtctacctgatatctcaattctatctctaattgcattgtgtttagagacgcatcggtttagttgggactgtctcggttaggtatgatctcctgtcttagccgatatatctctacaatcataatgctgttctaaatagatttgttatatctatcacattagatagatctatcggctcatcgagtattagattatcatatacaatctcgtgctgcatcggttaggttcgatctactagattgttgttgataatataagtcttgttaagtcgataggttcatgctaatgttttatcggggtactagccgataagttatctggacgttgcatcggcttgtagggattgcatatacatataagttggatttagccgatggcaacaaaggtttcactatttaatctaatcttgtggatcttatgacatcggacctccagctgatgtgtgctttaaccttcggatcaatatttgttctactattttatattgttagccgattggtttctactggattatattgctatattatattatcatcaaccgattgcctttatatcattatccacattggacttatagccgattgcttaaaccctatcgctattggctggtatcggtatcggctattatcggctatcggctggaactactccatcggcttgtcagccgatcggctgtttagatctactatttgcatatcttgtcagttgcaggatcaaactgactggcacgcccgcatctcatcaatctttgtacctgcacaggagctaagcagatctcctaggccggtgtgttcgatttttttcgtcaacacatattagcacgcctggtgggaccacaaattttatatccacatgtctgaagaagaagtcaatgctaagatcatagtcacggtggagaatttaatggaggaacaacaatattggctcggggggcaagtgcatcagttttagcatggtggagcacatcagtatcagctcatgaaagccgattgcaagaagcaaatgaagatcggttttggagttatcaaggcgagacagaagataattttgaagcataagtcctcatactccaaaatttgggggcatgtgttaacagtgaaatttggtaatcccaaagttaccatcggtttagagtcagtatcggcttcaaagttcgagaatcagccgatgggagtcaagtcgccacgatgtcgtgttcttggtggagtcggatcaatcaaaggaagcttatctagaagagttcgagttcaagaaggatgcgacatgacagttatctattaattaggcatagtttattagttttcttttatctttaggaaagtgtgtttagtgtccgataaggactttatcttttcctttttagtttctttcttgtccgacaaggactagtatctccctatgggtataaatatgtacacccggggtcattgtaatctatcaatctatcgatcaataatactctcggcgcatcgccaccctcttccctgaggtttttacttatcttccggcggaacttgggcacctaacgcagggctgcatcggctttcgatctccagcgaaggggtaagtcctatgttctgtcgggccctggtgaatctgtcgactacgttggtgttgttcaaggctgcatcgattcgatctcttggatcgctctggtttggttgatatatttgcctacctgatatctcaattctatctctaattgcattgtgtttagagatgcatcggtttagttgggactgtctcggttaggtctgatctcctgtcttagccgatatatctctacaattataatgttctaaatagatttgttatatccatcacattagacagatctatcggctcatcgagtattagattatcatatacaatctcgtgctgcatcggttaggttcgatctactagattgttgttgataatataagtcttgttaagtcgataggttcatgctaatgttttatcggggtgctagccgataagttatctggacgttgcatcggcttgtagggattgcacatacatataagttagatttagccgatggcaacaaaggtttcaatgtttaatctaatcttgtggatcttatgacatcggacctccagctgatgtgtgctttaaccttcggatcaatatttgttctactatttcatattgttagccgattggtttctactggattatattgctatattatattatcatcagccgattgcctttatatcattatccacattggacttatagccgattgcttaaaccctatcgctatcggctggtatcggtatcggctattatcagctatcggctggaactactccatcggcttgtcagccgatcggctgtttagatctactatttgcatatcttgtcagttgcaggagcaaactgactggcacgcccgcatctcatcaatctttggtcctgcacaggagctaagcagatctcctaggccggtgtgttcgatttttttcgtcaacacagattggcacgcctagtgggaccacgaattttatatccacatgtctgaagaagaagtcaatgccaagatcatggtcacggtggagaatttaatggaggaacaacaatattagctcggggggcaagtgcatcagtttcagcatggtggagcacatcagtatcagcatggttgatttttcattacattttaacactgttgttgtcttacttaacttggggaatttctgcaatttgcaagtgtgttaccttgcaaactatacctttttcttctatttgaactgtttcatccaagttcattgacgtgatgatcgattgtaattcataaacagcgtgggtctactcagctgtatccaacataattcgttcaccaagaagcaatcacccatagctactttattattatttaaatattcttatgttggttactgaatccttttttattaaggatcctgccaaacgtgccattttttactttattcatgtatcccgcaacaatgcgcggggtaccatctagtatacatattgtaggtgtacttgctttatgtgatcgggatatatgtttgtgtatatgcatccaatgtaagtatttatagtagttttacaagtagggtcaattcatgtgttcctaaaggtttgaggcaacatctaggaacatattattgtaaaaagccagatgtaaaggatctttaataatataaattagtaaagataaaaaaataatgtttaaagtaaatttaatgataaaataagtaaaaaaaaaggtacttacatagttaatttcactgcagatatgcaaatatataagttattcttaaaatacatttaataacaaattaaatcacaataaaataaataatacttaacaaatttcacgtaaaaaatatttaaagatggaggtggtactatcctgcgggacatgagggacgtcaaattttcaattcatatctccatggtggagaagctcgctgaggttcgttaccaatccagttcgatggtgcatgtaaataggtcatgcgggcgcccgatacatatagcatgtatatgtatatacacgtataaactttatacatatgtaaatatgtattatatcaatacaaagtttatgtatgtatacataaaaaattctacgtataaaaatattgacttatgaaaaatatacatatatatgaagtttatatacgtacgaattaaaaaaactgtgccaccccctctccgtgtgaaccacgtggctgcgttgcgcaggggaggagcatgcctaatcgacataggggaggcatattttaaggagataaataaggagagagaagagcagcgggctacagatttgtagccagctgtagctcggactccaagacgcagtgtgtgtatgacagatgggaccatgtattaattagattactattaaatctaattaagattttcgcagtcatcaagctaattgcaagacaaaacacgctaatgtatacacggtgtgaggataattgaagacttaaaaatcctatcgaaaaacgcctaattagaattttcgcagttatcaagctaattgcaggcaaaacacgctaatgaagacaattaattgcagtttaaacacgctaatggagacaattatttgcagtttaaaatatactgccagcaaaaagtactttccgttgccgggactcgaacccgggtctcttgggtgagagccaagtatcctaaccagctagactacaacggatatagtaaatggaaaatgaaatgtctctaatgaatatattgaattttaattcgttcttcttctcgctgcaagaatcactgaaatggaattccaatgacgacgggctgcattcctagacagtttctaaagtggaaactattttaatctatgtgtcactcgaattgttatgatttttttaaaaaaaattaagaagatatatatattaatatgtgatatatcacttcataaacctacaatattgtaataaaaaacaaattaaatattcacacttaaaaattttttttggttgcgatacgtagaagttcacatcgccagacatgttgtgacacgcaggagaggagactgtcacggtgcttgtttggcgttggacaagtgaccagcgctactcggcgtgtttggcataccaggcgcgtttttctatggctagcgttcctttgcctgttctgatcttctctggcacatgaagggtcatgctaaatgcaagttcttcctctgatttgcattttagcagcgctactggatgactgatcttctccagaagcgtggcatcgatagtcacccggtctgttccttttgtgctcaggagcttgagatgacgaaccacattctgctcgactgcgtgttcgcttggcaagtctggctccgtgtgctgtcgtcttctggttgggctgccctctctccaccctgtggtaattggctctaggactggtggccattttctagggcatacttacctgagcatcttcatgccggtttcgactctctggtcctactagtctcttggcagctgtggaaggaacgaaactccagagtttttgactctgcggtctcttcggtctcaggggttctagagtcatcctctcagaaggccatctatggtcgttagctggcgacctggcattgctacttttggggttttcttgggagggtagtgtgactctgccttcttcccgctatttggagttgtgtttagctgttgtagtagtctcttcctttttctcggtttttgtttttattttttctctcttttcttgacataagtcggtctgactgattatggtgtgtatcaaacactcttttcttttaaatatattgacgtgcaatctcttggtgtgttcggagaaaaaaaaactccatgcaaaatgcagccttgcatgcggttgctggctgtcttgctaaacccaaagtgccgagtgcccacttcacttgcacggtttgacctcattttgccccgtttttaggactaaccgtgaaggcaaagctgaatagcctgccaccactacgccaccacatactctcaccagttgctgatgaaatgtctttaggactaatcgtgcatgtagtacactttccggctttccgctccctgccgcctatctcggattctcggtgtgcatgccactggtgagtatacggattactataaggaatgaacacccattagctgcggaattctgtgtcaagggaccgattgccactagctatattttgactgacaaaattctaggagtagtacttgcctacggcctacctatggaccgtcagtgtcacttggccaacatcaaacgctctaggcaccggagggaggaaactcaatagtccagcctaaaccatgcatagatgcagacggctgatgtcaactgtaaattaagcatgctgagatgagctgatttaagcccagccgtttggtactctaagggattttgagtttttatttgcacagtttgaccactcatcttattaaaaaaatttagaattattatttttttgacttaatttattatttaaagtactttaagcacaacttttcgttttttatatttgcataatttttttaaataaaatgagtggtcaaagagtgtaagaaaaacttaaaatcccttatattatgggatgaagggagtagtatattagtgttggtgtgtgacctaactgatattcactgcacaccacagtcacatgaccaaacatacacggggatttgatgcaacagtaaaaggtctgtaaatgaaaaagcaaatccaggacctaattaatcttttctggccatccagtactccactgcacacagtcaatcaccaactctctccaaggcgtaaaatgcggcgagcctagacaatccgaggccgagcagccatccacacgccaagagtttgtttggatcctttcattcaagtactagtaattcaataattgtcacccactcttcatatagagtgaccgagaatgggatctaaacctttagtctataaataactttataaattctaaagatttaggaataaataaaagggttgggttaaaatttatatacatgtttgagttagaatattagaaaagggttgagttgaaccgtgaaagaaccgtcagctgtatgcatggttgggagaactagatatttgaccctaaaagagataaaaggtcaacattacacatacacttaggccatacatagtgtgagtacctaacgagtgattcaggctcactacatcagagttatgatggcatatcagccatagatgtgtcctcgtgaggcttctcgtgcgtcgtcagggcacggttgcctcatcagggtgagtgcttgggctcaccatgtcagagccgtggtgatatatctaatgagatagttccttcacaaggcttcttgtgcctttgcagagggcacaattgtctcattaggatgggacacttgcaagtgtagctaaagcatgcaagccacgtcggtaaggccatcgccccacaatatgccccctccttccgcgtggttgcacagacctcaatgttgcgagtactgacaatgtcggttggaaagcaaagaggcaatggctagagatacgaccgacaagtccgcaactagtggagagggtcagatatagatagaggaggaacgtggctaagagtagcactgcatactattaggaccctgtcaccattgccatcaccgcgaccaggagatgtcatcgaccaagtcactgccttttgccgccgaacttgttgggtagagctgccctcaacatggctggatttgaggtgaagaaggatggcggcagccaggactagacagtggagtagcccgttgatctaaaccaccttcgatccaccttgcataggtcttggtgacgtcagttggagagggggaaagtcgtggggctgccttcgatccacaatagtgaagttgtggtggctggagtgggaggagctgtggtgcctagagtgggaagatgtgttgataggcaaaacgaatataattagtggttgacaagtaggccaatggttatgatgtaacttttgttgatgattctaaaggttgttctgcatatttatttaatgtaaaacatatattagctaagtttatgaactgaattatttcaggccctagtcaaagccaccatacattgtgagaagggtattataagatataacttcaatctacattccacattctttctccctaaggccattcttagaagtagcttccatcgtgaatgcccttatgcagttttcccgtccaatttctacactgaggtagtatatatagtaggggcaatttgcagggaaaatgatggaagacattgactagaaataaaacagattgttcttttttttttccatcaatagatgaatcacaaaagttggcatggtatgaaaaagtagagaaaaattaagcctctcattgtatgcttctcttatttgccgaatccaaaatttaaattttaaaacttaattttagagttatttataagtttctttgttcatactggcttttaaattgtgaattatttttgttagtttgttaattttttaaggacttatcaacccgtaactcagaccaatcaaaacctaataagtaatccgaaatctcttcaagtttactccttcgggagtccaataagaccggcatgcatcaacatgctactcatcggtcgcacctcgcagtagcgcaactgaaacggctgcctcctgtacgtgcatgcagatgcagccgcatgtcgtctttggccgtttttgcaggtgacgcagcggatcggcagaagcaaatgctccaatcggaacgtactaatgcccctggcccagccgtcgtcgcaccagtgccgcacggcgaggcgaaccatacacaaacgggcagtaaatagttagtgggggtaatcatgtgagtttgtccgctgggatcgggtcatatggtgacccacgaccaggaaaagtacgtggcaaaattaaacaggaggagatataggtagataagctagagaaagcttcagagcgcaccgaattaaaagcgagcggttgtctacgtacttgcacggtgacagtacgtctgacgcagatggcattttcttgatgttaatcacggcttaattcagtggataaataaaaataaacggagggagtagcacccgtgagctgtagctaggttcatagcaaagttgtgtaagtttgcctcgtactggattagtacagacgaacgaaatgacgacgcgtctaattgatttccccccacttcttaagttcatcgtgcgtttcgactctccttatcgttattgtcagttttgccggccgtctgctcattttcgctgaaggtttaggacctcgatcgagcacgtacggtagtagaaccgatgttataccgtgcaagacgatcatgatgtcccttttatccacgacattacaacaagaccacaacaaagcatatctactattagtactcttccaaccacaattgcttgtaacaaattatatttttgtttgaaccggactaccatatacagcatgtctaagaaattccccaaactaataatacgattttctacccactagattaaaattcaatgcctcacaaattacccacactcttataatctcaagtgcactcatccctaatccccattaactcgaactcgacttgcctactgccaccgccacctcccacctctttccccggctcagaggcgctatccatctgcctctccggtgtcgcctccaacgcaggccaaacccgttggccagccacaacaccaccaccggcttcctccctccacctctctacatcattgttccctctccttcatcatattcctcaccaacccacatcatctttctatgttttcggtggctcccacgagtagattaatcgtcacttatcaacatattcttgatttccgtgccacctccatcatgctcctccattctcatagcttcagcagtgccccattgcctcaacgccttcccgacaccatcgcgcactaccaggctatcacgccctagcctcaaaacccattactcctcctaatctgaccatgaaaaacctaacccagtgggatggtagccgtgtccttgttggagggttactggagttgttgggggtcgctgaaacttgaggagaaggaagccattgcatgaattttcaagttaatcagaagtcacaaaagtagtaagattgttcccctaaatttctgtcgaatggcagttagcaaaatccattgaatcaataatcactaataggttcttagatttcttttgtatatctccatggtgtctcctcctccccctttagtcttcttggtatttgaaccatttgttactcaatcgattgctatctttatctttgttgaccgatgtcatctatgaaaattttgatttagtggatggcaatagaattagaagggagtatgtcagcgtcccagatttactacagaagactgaagttgcaagggaggaagtacatactcgtctagcaaggcccattcgtgtgcgcaagaccaattatcgtgtaatcagactggactaggccaaatgagcaccagctccagctgtccgaatcggtagcgtgagggaattgactcctatatgtactaatactgttcttatttgagaaacaagtaggaaagaagttggcggtgaaggcggcggcggcgccgatccggttggatctggcggaaaaattcttgtgttcttgagtgaattccttttgattgttggattggcgttaggtagctaacaatctggtatcagagccaccacccaaaattttttcctctcggttcttgtggtaaatcctgagcgaggtggggattgttgcttcggcgacctgatcccgcaaaagcttcggctccctcaatcgggtacgcaagttcttgaggaaagcttcagccatggctgaatacgagaaaccccgctacgtgactaaaatggcggccaaggtcttggatcaggacagcaaacttgatttgctcctgaagaagatggaggacgcagagtgcaagcaggaggagagcgagaagcgtcgtgagcaatctacagagaagagtcgtgcggagttcttggtgctcaaggttgtagttgaatctcgttttccagagatggagaagcgcgtggatctgcttcaagattctgttctggagctgcaggagcaggtggataaaattcaagcgctggttaagtcgcctgatggtatgaaatcacccccctcctcgtccccttcttctccaaccactgataattctgtttcgcttgggggttccatgggaattagtggtcatgttccgccgatgagctgtcctcagttcaatggagatagtcctcagatgtggaagagcaattgtgaggagtattttgaaatttatggagttcatcctcgcaattgggttcgggtggctggattgaattttactgggaacgctgcattttggttacagtccataaggtccacgttggttgggcttagctggcaagcgttcacagatttggtatgtctccgttttactaaagctaggcaggaagtacttattcgtcagtggttccatctcattcaggattcctctgtgtctgactatgtggtgaagtttgatggtataatgcaccaactcttggcctataaaagtgccttaccattgaactattttgtcactaagtttgtggaaggtctgaaacctgttatccgctctagtgtgctgatgcaaaaacctcaggatttagactctgcttgttctctagccttattacaggaagagattttggaaggggatcaatctagtcagtataagaggcctgaactgtctgtcacctatcgacacactaatcgactgtcttcccaggctgccacatctattcctgtcactacagttgctgcagctgatgataagaagtccattgtgactcctgtcagacctagggatgataaattggctgcactcaaagcttatagaagggctaaggggctttgctttacttgtggtgagcgatggggtaaagatcacaaatgtgctcctgccatacagttacatgttgtacaagaattactagaggttttgcaagttgatgactctttgtctgacagtttggaggatgactctcctcaaactgctccaactcttatggctatctcccaacaggctatctctagtactgaatctccagtttctttcaggatcaggggatgggttcagggtgtggaagtccttatgttaattgactctggtagttctcattccttcgtggacagtgctctttctcagcagttacaaggggtacaacagctacctaacactgtatcagtgaaggttgcagatggtggtcttttgtcttgctctcagtttatacctcattgtgaatggtgcactcaaggttatgttttccacactgaattcaaatttcttccccttggtacttatgatgtcattttgggtatggattggctgatgcaactgggtccaatgagtgtggattggactgctaaatggatgtctttctagagggctggttgtcaagtgcaattgttgggtattcaggttcaaaccaaccactgtttgggtattcctggtgaacaacttcaaggcatgctgaagatggggtctgttatgcatgtcttacaattgcaggaaattttgtctgtcacagaagtgcctcttcctcctgatattggccagcttttgcaggaatttcagtctatctttgaggagccctagggactgcgtcctaaacgagcttgtgaccatcagatccctctcctgcccaattctaaaccagttttcattcggccttacagatataatcctgctcaaaaagatgaaatagagaggcaggtcaaagagatgttgcttgctggggtgattcagcctagttccagtgttttctcttcacctgcactattggttaagaaaaaagatggtacatggcgtttgtgcatcgattacaggtaattaaatgctatcacagttaaatggaagtttcctatgcctgtcattgatgaattgcttgatgaactctcaggagcccgtttcttttctaagttggaccttcgagctgggtatcatcagattcgtttggtggagggtgaggagtataaaacagcctttcaaacgcatactggtcattactaatacagggtcatgtcttttggcctcacgggtgcacctgccacatttcagggggctatgaatgccactttagcttctgttttaagtttgcacttgtctttttttgatgatatccttatttatagtcctgatctgacttcccatcttgatcatcttagacaagttttgacacttctctctgaacagcagtggaaagttaagatgtccaaatgttcttttgcacagacacaactttcttattttggtcacatcatttctgataaaggggttaccactgatcagtctaaagtggaagaagttgttaattggaaagtacctacaactcttaagaagttgagaggttttttgggtcttgctggctattatcaaaaatttgtcaggaattttggtattatcagccgacctctcactctcttgctcaaaaaggatgttccctttgtttggtcatctgaagcagatcaggcctttcaatccttaaaaatggcattagtatcagcaccagtattggcccttcctgacttttctcaaccttttatagtggagacaaatgcttgtgatgttggcattggagctgttctttcccagcaaggccaccctattgcttacattagcaaagcattgagtttgaaaaatagaggcctctctacctatgaaaaggaatacctcgccattttattggcagttgaccattggcgctcttatctccagcaggctaaattcattattttgacagaccatcacagccttatgcacttgaatgagcagaggatacacacaccttggtagcacaaagcgtttaccaagttgttggggcttcaatttaaaatttgttaccgcaagggcagtactaatgcgactgctgatgctctttctaggaagtattctgaggactcctctaaactgaatgctgtctacagttgtacccctgtttggctccaagaagtaagtgatggctacctttcagacccttactctgctcagttattgtctgatctggccctctgccctactgccagaccattgttttctctgtgtagtggcattatcaagtataagggccgtgtttggcttggcaatcatctggccttgcagcacaagatcattgatgccttgcacagtagtcctatgggaggtcattcgggttttccagtaacttacagaaggatcaaggctttgtttgcttggcctaagatgaaacaagggattaaggacgctattgctggttgttctgtctgtttgcagtccaaacctgatcgctctcggtatcctggccttttgcaaccactccctgttccggatggtgcttggcaagttctaacaatggactttattgaaggattgcctaagtctggcaggtataactctatattggttgtggtggataagttttctaaatattctcattttgttcctttgtgtcatccttttactgcctttgatgtggtccaagcttttatgagcaatatctataagttacatggtttgcctcaattcatcatctctgatcgtgataagatatttatgagtcaattttgggaacaattgttttctcggtctggtactaagctgcacttaagtacttcttatcaccctcaaactgatgggcagaccaaaagggttaaccagtgcttggagatttatttgcgcagttttgttcatgccatgccatctaagtggagtttgtggttgtacttggctgaattctggttcaatacttcataccattcagccttgcttaaatctccttttgaggtgttgtatggatatccacctgggcattttggcatcagagaggatgcctgttcgatttctgatctcaacacctggttgtccgaacgaaaaatgatgactcagttgctgcaacaacaccttaaccgagctcagcaacagatgaagtcctatgctgataaaaagagaaatttcagggaatttgcagttggcgattgggtatatctgaagttgcagccttatattcaatcttcagttgcacgcagggcaaatcacaagctatgctttaagtacttcggtccattccaagtgctgaatcgagttggtaaggttgcttatcacttaaatcttccggatcacagtgctatacatcctgtgttccatgtctctcagctcaagccagctattggattcaagcatgctatacaaccccgcttgcctaccctatctcttcatcaagttcctgtgtctattctggaatcccaccaagttaaaaaaggtaattcttcttcgacccaagtgctggttcagtggtctgatgcggtggctggtgaggagacctgggaagatttagttgagctgaagcaacgttttcctggggcattggcttggggacaaggccaatctcaaggggaggggattgtcagcgtcccagatttactatagaagactgaagttgcaagggaggaagtacatactcgtctagcaaggcccatttgtgtgcgcaagaccaattctcttgtaatcggaccggactgggccaaatgagcaccagctccagctgtccaaatcggtagcgtgagggaattgactcctatctgtactaataatgttcttgtctgagaaacaagtaggaaagaagttggcggcgaaggcggcggcggcgccgatccgggtcgatctagcggaaaaattcgtgtgttcttgagtgaattccttttgattgttggattggcgttaggtagctaacagagtataatccaagcacaataacaattgcatgacgtgagttggggtggattttaatggagcacgaattttgtgtggtgggtcttaaggacgatgaggaattaatggaccttttgggtttgtttattctaagtaattctctagtcgtaaatatctgacgtatgataatcttttgaaaaaaaatgatccatcatttctatgttaaaataaatttatcaactatcaagtttatcacattatggtactgctttcgagacaaatatacacgtacaattgctgtggtttactacaaactaagtatttgggaaattattattcgccaaagttttaatagtttggtaagatcttatctaaagtaaaccgaagggagtagcaagtttgcaatggtccctgtttgagccagcaagaaacaataaaatgaaaatcttttaatatagaattttcactatgtaaataaaagttcacatatatgtaaaggaattgtgctggatttgttttctaggagcaagttagtaatgctcgtgcattgacccagtaagaaacaacaaatgaaaagttttaagcttataatattttcactagaaaatctaaatccaatacacattcacaggagttggctacgattaaattgtttccgtatcatgtctaaaagttttttttttttttggactgggtagtaagaaaactgacgtacatagctgtattgtggcaagcgaattcgcatgttgaatttctcaaatatgatattttaaaggtttttttattgatagtttggagtaaagttcaatgcttccttgatcacaggtgcaacgccagcgatacatgcaagtgcattaggcaattcttgattgtgtcacgattcactacagacttgacatttactttgacatctcccggagcatattacaagttaaaaaaaaaagttgcaataccaccacaattctttggaaggccatcaaagtcggatacatttttgtaacaatataatgtcgaaattaattcttgctcgaccagttcatgatcagccacatcgtctagtcactagatgagtccatgcatgaatgcgtagaaacttagtaaatatgaacgtcaaggaatggacaatatgacgtttctatcatgcatgacgttttggtgatttgccaaaaataaataggaagatcaatagcgtccagttgttatcatgttttaaaaaaataaataaagatgttacatatctatatcctacaaaaacagaaagcgatttgcacatatgcggtttaaggctgtaatggcgtagactatcaagcagcacatctgtgatttgatatgttttttagcctggagctccacaagcacccagaaattggaaactgtcaaaccaagagacgaggaggagcaaaaaaaaatctgtaaaaaggaaaggaaaaaaaaagaagagaagaaataaataggagagagagaagcttggccattccatccactgcgtgcgtttgtaacttcctccgcagctatctcccttgctctcgccatctcgccattctagctcccgcaaagctctccccccccgaggcgagctctctctgctcccgagcgagagctctcgccatggcgaagaacgcatgcaagctctgctaccgccgcttcgctagcccacgcgccctcgcggggcacatgcggtctcactctgtggcggccgccaacgcagccgcggctgcggcggcggccgcagccgcgaagctgcagatctcatcggcgtcgtccgcgtcgacgtcgttcaccgcggccgatgaggaggaggaggaggaggaggaagaggaggacgtgggattcaagaagcccctttccatctacgcgctccgggagaatcccaagcgcagcctccgcgtctccgagtacgcgttctccgaccgcgagagcgaggccgagtccaccccgacgcccgcagccaagggcttacgcgccggcggcggcggcggcggcggcgatggcgagcccatgagctcgttgtcgtacgcgggaacgccggaggaggaggtggcgctggccctcatgatgctctcccgcgacacctggccgtccgtcgagcgcggtggcggcgggggcgagtactcggacgacgggagcgacgacggctacgcgctccctccgccgtctcccgctccggcgccggcgccggtgccggagaagcggacgcggttccagtgccccgcgtgcaagaaggtgttccggtcctaccaggcgctcggcggccaccgcgccagccacgtccgcggcggcaggggcggctgctgcgcgcctcccgtcgctcctccccctcagccgcatccgcagccgccattgccggagcacgacgcgggcgaggaagacatggacgggaaggcgccgccgcacgagtgcccctactgctaccgcgtgttcgcctccgggcaagctctgggcggccacaagaagtctcacgtctgctccgccgccgccgccgcggcccatgcacagacacccggcggcggcgctcctccgccccagcccaaaattctcggcatgatcgatctcaacttcgcgccgcccgtggatgaggtggagctctccgccgtgtcagatccccacttcccctccaatccaccaggtccttgaagcaagaaaaccagacttggcaatggcggagatgatgatctgaggtgaggcataaatcgaagaaacagaaagaataacaaaaagagggaaaaaaaaaagagaagagaaggataaacacaagaacatattttttagccccttagttaatcttctggtcgtaccttttagtattccattccattgatttgtgttcagaatgtttaattaatatgttactaccatgctgttgctttgttttttttttgcctgtttaagctatggaatcgatgtagatttgagcaactgacagtgcaacaagaactagcccctgttcttgatctgttgatcccaattcttatgctgaactgttgctttctgttgcattcttgatctgcccatagtctccagtcgagtgtactggctgtgctcctgtgccaacaaaaacaaaagcacaaaagagtggcagtggagtagtagtagtagcaaccaacgtaggagtagactagcttagcttttgcatacaaaagccaaaggctttgtttggatcctccgaactattaaatagccctccaaaatcttgttatttaggagtattaaacgtagattatcgacaaaaccgattccattatccctaggctattttgcgagacgaatctaatgatgtatattaatctatgattagtgactgattactatagcatcactatagcaaatcatggattaatatacctcgttagattcgtctcacaaaatagccttggggttatagaatgggttttaccaataatctacgtttaatactcttaaatatcaagatttcagagagctatttaatagcctccggatccaaagaggtcctttgttttcttgtgttgctcttttcttccttttgcttctgcttccgcttccgcttccgctgccactgcacgcacacgccacctgcatgcgcccggcggcgcctacagtgagtgccactgtccatactgcgccccccctcccctctcactgcaagtgggccccaagggatgtatgtccagtgtattaagccgtgtgctaaggtacaaatacggtgtgtttaatagctgtattctttcttgtaaactcacactgtgtctgtgtcacatctgaagctctgaacaccaacgaaacagtagccagccgttctcttcgatcgggagagaaacggcactcggttttgtaggtctcgccctccttatttggaggcgggtagttagaatctcgggccaccggtggcgcacacgtggcgcgcggcggtgggacccaccacactttttctggggccctcttgcggcagccgggtcattgctgggcgtgggggtggtctggtcatttcatctatctccggtaatccggggggccgttaatattacccggaggaattattaaaatcgtcattaataaggttattattaagcgcatcgcgtcagtgtgcgcgtactagtgttgtttgccattgccgtatcgggaggaagccccggtgggcgcgcagtccgaggcggatctcgcgggcgaaatggctggtgcacacgggcggatctggatgacaggtggggccccacgggccaactgggtgtgcacgcagccacgcacacggctcggtctcgccacgtacggacggacccccggtggtggtgggcatgcggcgcgtggtgggggggctcggcgatgcggggccgtcggatcgtgattggacggatgccgttccgtgtcagaggtcaccaggccatcgtcatcatcgagccgcttgtcgtgtcccaaccccatgaggccatgatacgagaacaagtgtactcaattcagtataatcaaattttgaatttaaaactcaattttagatttgatttttgtgatttaatttcttcgtcagagtttattttatagatattgttggttactaataagcagtatcaataaacataataatataagcgaaaagatgtggctcgttgactactaataaacccatggcagctaatgcttgatataatactcttccttagtgtttcacattacggtacacatcacagtagtatggtcgtccatagctgatggctatatttgtttttgttagggaaggaatacaacatttgtgcaattaaatggcaccagtatctttcccctcatgtcttgacccgagtgcactgagatttgagagtggaaggtgtgcatcatatgcttacaccatggtgcacgctatactcgcttgtcctattcccactggagaccggccgggaattcttccttctaccgagtagtatagtgacattgaaagtgaggcattgtttgggtttagagctatctagatcggctagaaaaccaaccatgcaccaaaccttttttgtacgtccgtccatccaggaaatgtaggtgccgagcaggttccatatacatggatgcacgcgtgattccggttcgttttgtaaagttgctcacacaagtcgcatgggggccgggcctgtgtgtgtgtgtgttggtcattgcctcattggtacgcagtactcctgcaaaagcatgtccaaatagtagcaacccttttattgtacagttctacgggtctgtttagatacctgctaaaaattttataccctatcacattgaacgtttgaacacttgtattaagtattaaatatagataaaaaaaataaacaattgcacaaattgcgactaatttacgagacgaatcttttaagcctaattgctcaatgatttgacaatatggtgctatagtaaatatttgctaatgatggattaattaggcttaataaattcgtctagcaatttactgacggattatgtaattagttttttttattagtgcccgaataccctatgcgaaaccctatataatatccaatatgacacgccaaaactttacacctctggatctaaacattccctacacctgctaaaattttatactggaaaattgattaattgccactattaagagcaaaggaaatcgacaatgattacatctctagcttagctgcagcctgcaggagatgatcgatcggtccatgcatgtgtattgtttgcatggtttcatatagtggtattggtttggtccataaatgacagcagcagcaaatctcatgaccgaatgtgatgtgtggccattaatggggggttcctccgtgtgatggaacaacgggaggccgatcgattgatccatccatccatcgagcagttacgttggtgcgagggtcggtcacatggttgttggtggcctcggtttacaaacaagcaagccgtgaaggggggcatatatattgtacctcgtcacgctttacgctgtcagtctcccagatctcgatcggtcgatcgatcgccgtttggggcggacggcacgcgcaggtagcgctggtccacattccacgagcacgtcgactcgatcgggaaacagttcagattttcgttcaaattataagaagttgtgtagaattcggaaaagctgcactagcttctcccaaatatcatatattgtatcatatagtttcgattctcacacatattcaggggcggatttagagtgagatggaggggagtgccacttgtttaatttactctgatttatatcaaatttaagctaatgtgggtgtctaaatttgtattgaggagggtgcacacatggtgaaaatagatcaggtatagctacaaaattttctagctcctcccctacttgggggagctcctagtagcttgagattcttctagaagtcgcaactgtcagaagcttctcgaaaccgtttagattttcactcagattctaagaatctatagttgtagaatccaaatttttaacaactgcttctcacaatgtaaagttacctcaaacaggactactatatagctataggatctaaaaaagaactcaaaaatctactccttccgtctcagaatataagaagttttagagttgtgcacggttattaagaaagtagatagaagtgaatgatgaagggttgtgattggatgagtagtgggggtatgtgggaaaagtgaatggtgaagagttgtgattggttgggaagagaatattggtggagaagttgttatattttgggacaaatcctaagaactaagaattgttatattttgaaacaaagggagtagtttattttaaagattttttttaagaagccggataccaatcaactccatctttgaattttaagtttcccaaacggagcgttaatcagttgcacggtgccgttcatgtgaatggatagtgctgagattggtgaagagggtagctagctgctactggctgtggctggtatggtgagcgcgtgtactagccgtaggtattgttatctttgatcaggcatctctagcagagtagcaggtggagaaaaggttcagagaaaaggaccccaaaatgccgaccgagccgtacatccaaaccatgccggatcactggaaaatgtacccattcatgcatcaatgcatgcattcaacccaagctttgtgaatattagcatttttcacgctcatgacgacgaagacgaaagatgcgtgctctgtaaaagctagcgcatcttgtgggtcttggaaaagacgcaaacttggcttgtaaagacatcatactcaacgtacacacgtcgaatctggtaggagcaggagcagagagccaaaccagcaaacatttgcttcgcacaacctgtagagatttcacagtatctccagttaaagctggccataaaaactgatattaacccaaatgcgtgttcatgaatgttatgtattgtggtgagaacggttagggtgtcgtagtgactagtaactgactacgcgtaaattctgtacagttggtcccgattggaagatgctgctgaattagaatagagacagagtagttagcactgcaggaatgcatgcatgcagcgaacacaggaaaggcaggaagcatctcctcctctcctctgatcacagtgtttggaattgaagggggacggagaaggaaacggaaatattctgtcctgaatgagcgagttcttgcttgtccgttagccactggggttctggagtatatcaagcttgttgcttgtatgtactccagtactgacgaattgtgagacccccctggtgtgtggtgaccactgagcaaccgagcagcttttgttcagctgtgtgtttacttgcagcgtagtagtacatggcatcattgtgtgtattgcatagtactccctccgtccctaaaaaaggcaaaccctgagttttcgtgtccaattttgactgtccgtcttatatgaattttttttataatttgtattttcattgttgttagatgataaaacatgattaatattttatgcgtgacttgtctttttaatttttttcataattttttcaaataagacggacggtcaaacgttgggcacggaaactagggtttgtcattttttgggacggagggagtacgcgacaaactgatgcatgtgcctagctagctacatgcctatatacaggatgtagccttggctgcacagcaattggtctctccctatcttgggctcatggcgtgactgcagagcagggcaagctcaggttagatcgatgcattgcatgaatgttgaggcgcattcggcatggagcatgcttcctgaaatcaaatgattttgatcttttgtgtttgtgtgcgcgcgtgttcagggagtggtttcagatgaaagtaaagttgtggttttagtgctcgtagtactagtttaggttttactccctccgtcttataatataaaggatcttaactttttgcttgtactgtttgaccactcgtctcatttagaaaatttgtgcaaatataaaaaacgaaaaagttgtgcttaaagtactttacataaagtaagttacaaataaaataaataataatttcaaaattttttaaataagacgagtggtcaaacagtgcaagcaaaaaaaatcaaaatctcttatattatgagacggaggaagtatgtcaaagtaaagttgggatgctagtttatactagatctgtaggtgtcatgtgtacatcatatcattttaaggggctggagcatgagtgaaaatgtgaaatatactggtgtcatgtgtactacgtacctagagaggcatggagatggagcaaccgaagcctgaaggcacctagatgctttttgccttcactactggttacgcacaaatgcacaatacaaaccgaccgacagaagcaggcaggatcatgatttttcagataagggaaaacgctggtagtttctactgccaatggctagatgggtaaacccaaagatactgcttgtgcaaaatgcacgatccgtatcatcctgggatggcaaaagcgtgttaccatgtctccaatctctccacccccccgatatatatctccgatatgagctgaaatgcgtatctaatttacgtctactataaatataattttctagctaggttatcgtgatctgcatatccaaaactaggagacgacgcgcgctcacgcagtcactatttgttggttgcgaaatgctgcgactatctactgtagcagtgacaaaaaaaaaaacgcacaactcgttcggtcagcatgcattgaacatgctcccaaggctaagttatttgtaggaacttacatatgtaattttttttaaaaaatttccgttagcatgttttatgtaaaatttttcaaataaatatatttgtcaagtttgcaataataatactttgattaattataccaaaaattttcaccgaaccacccaaccagatgggccataagtcgcaaccatacatacgatagctatctggagccacgtgcatgatcgctcctgtctcacacaagcaatccgcatggctcgtccaccaagccatgatcaagatcaaatgaatttttactctattagaaaacatatatgatctactttttttttacccatggatttattaacgggtaaaatccatacacattactttgcaggtaaaccaatactaaaactattggtggcctaagacttaacatccaccaagcctatattaaattcatcccaccctacaacccctgttgtagcgtcctatagacctttgctacagctcgtagccctatttttaacacatatactacggtagcgagtagcaactagatataatgcaccatgctcacgaggtgacctcaactagggggtttggacaaacatcaatgactcaggtcctagggtattaggatcgaggagtcgtgctcgtgctccatctctagtctctcttgcatcgtcgtttagtctcctccctatatatattattggtattgttacttaacgtgtctctactaaccaaatgtgtatggggtacggatgaatcctacacccacgactgggtcttagacttttagtgttggatcggtaggtgttattttgcatgggtatacctacgggtaaggggatatagtgataattcgttgttgtaagaactgcaatctttcattatcataattggtcgtagctttaattaccaaaatgaatactacattctagaaaaaaatgtccgtctgaaggatattatcacaactgtgataataatactccctccatttcaaaatgtttaacgccgttgactttttagcacatttttgaccgttcatcttattcaaaaaatttaagtaattattaattcttttcctatcatttgattcatttttaaatatatttttatgtaggcatataattttacatatttcacaaaaatttttaaataagacgaacggttaaacatgtgctaaaaagtcaatggtgtctaacatttcgaaaaggagggagtacaaccaaaataaatgttgtattatgtatacacaaagactcttctaggggttctttcgagagaaaaaaaaagctccgaagcgtccgttaccgctcctattgcatccaacggttgagatggagctctgatattatcgtggggacaaccggacaacacacgcctatcttccctggtcgccccgcgacgcgccgcgccgcctccacatccctctgcccatctcgatccccgccgcgccgccgttcctccacgccgccgacgacgtcgcctccctccgtcccagccgcgccaccgccgcttctcccctctcctctttccgcccgcattcccccttcgctggggcccgcttccggcaggtagcagctgcgtgggcgcgcagagggggtagcctggcgatggagggcggcacgaacgcgcggcggcggcgtctggtggagaggggagccgatcgcctcgccttcatcaccggccaggcgcagaccctcccctccgatccgctcccaggtaaaaaaaaaagaaaaaaaaaggagagcaaatcgtttgttcttatggctgttgcgaaatctgtaatacggagtatgttgctttcgcgtccagatttaatctcgttagttgtgatgattattgttccgttttgttctagagaactatatgcatgcgtcgattacttggcctgggcgagactctctgttaggattgctgcagatgtgttaaacagatctgcaattcactattagatttggaatctcatatgccgtttagaaaactgaccatattacacagttcgttcggtgttgtgatgatgcaaaaaacgaaagttgctatttagcgtgttgacaaattgcaagggatgttcttctcttattgttctttttttacgtatgttctcttattgatcaaacggaatgcatctgttctgcatcatcttatctcacgaatatcacaggatgcataatttggtggtggtgtgttagtgtatagtatgtaatctggttctttcgacttgttattttggtgcaattatcttgctcaatagaacacaaaggtacattaatacattgctggaaatttgaagaggaactacttttatctgaaatttatacctaaaaggtcaatgtacacttgaagaattaaggcattgtttggagtgtaccaatatcagaggtaagcagtatagttcctgcagggactttatgaagatcctatgttccaaatggggcctagaagtttcttaccgtgtcttgcagtattattctctgttgaagggaacatagacagtcccctacctttattttgcagcattttggttttttaacatgggagaaacaagaatcattcgggacatttagcctcatgagatgtccttggaccttgatgctgcttttgcgctgtttgctattgcagttgattaaactgcattgcagaagtaggtattgtttgtgttctagataacggaagatttccaagtagttagacaagaaagatattcatgtgggagcacatatagaaggcttcactctttcatgaactaaaatttagcagctacctcagctgtgttaataattagctctccataacagcactacaactacctatttgcccttgtcatgcatcatttatcagctgtcagacaagagtcttcttagtcttgatacttccattaactaaccattgtttttttttcatctcattttcagtatcaatttactcattagattatgcatttatgctctctaagtcggtcatagttatccttgagcatctattataatctgtctgcaggagtatcattgcacttacagactaataattttattgacctaaattctctttatatatctcattcttaatttagatgattcctatgggtgtagtcgaaacataaaagctaaaacttttggcttcttaaacatcatgttttatgataattagtttctgttttgcagattcaccacttaattctgttgacgcagccacccctcaaatatctgaaaggaatgcaagtgagggtggcattagtggtgataaattcagcaatataactcggctgcacaaatcacaacctagtgatgtagtacctgaaagtcaactgtctgccaaagcccgtcaggaaattcatgatggtgacctacttcgagaattcaagacaagcagcacagttcctgaaattcagccagtaaatgaaacgcccatgcagaggcatggtgaggaaacacttggcaagaggattaatcatgatagaacagcaactgtgactaggaaggagatggaaacgagacccaaatctgttcctccaaaccagtctaaccaagcagaaaatgcagcttggtctgttgaaactctgaaggagcacttgaatttcacaccgcatgagattacacaggctatatcagctacagagtataaccgttttttagcctctgtcgctgttgcctttctggcggttctttcaaactggggcctggacattggtggtactatcacaagagtattagttggaacaagaccacttctgtttcttattataacgaacgtaaccattgtcttcactttgttgatggagaacaaggacccaaacgtcaggggaagatcagctggcagcaaccttggttctgctgatagcttagggcaaatgctggagatcggattgctgctacagaaatccctgggcgctctcctgatggactgcagcatttgtgctgtcatcctgatctgtttcctttgagttttgagtgggtatttttgatagagtttcacagaacggtcccctgctttgtaagtctacgccactgctctgtctattgttcaatcttgtaacatccttatattttgattcatttacttttctcgtcacatatagagctgaactaagccaggtccaagaaaaattggactgcacgtcgatgttgttctttgccctcactattccgtttgctgcattgtatgaccgaattttttttgtaagtttgaaaatttatctaaaaagctgtagacttcacctaaggtggatgatagagcgggatgacatgggaaagctaggctccttctcggttgatgtatcgcaggaaattacagtataattcacattcaggatagttcaaaactcgaatgatttctgaaaaccgtgagattaatttacatatcctgtagctgtcacgtgtacatcatgtcatgctaaaagtggaatagtactactatgaacatgaatcattcatgcataaacatcactataatagaacagaattactactccctccgtttcgaaatgtttgacgcagttgactttttatcacatgtttgaccgttcgtcttatttaaaaaatttaagtaattattaattcttttcctatcatttgatttattgttaaatatatttttatgtaggcatgtaattttacatatctcacaaaagtttttaaataaaacgaacggtcaaatatgtgctaaaaagtcaacggtgtcaaacatttcgaaacggagggagtacatcatagcttggagctttggaaaatcattaatcgctacagctttcctggggcgagaagaagtcaagcaacttggaggacagctccgggaacacgcgagttggacggtattctccgttgaggcagacgatgatggccgtcgattccaaaacgagctgcatcgaattaaacgtgataaacggtgtgcgtgcatatgtatgttagacatgcgtgtactgaaaatgaaaaaaagaaactgagcggcttcttttctcgctaagaaaacgtgcagcactgcagctagcacttattccctcagccaagatttatcccttgaattttttttttcttttttctgtaacggaggaagtagcctatgacaagagtactcccataaatagtcataacgcactgtccagagagaagagatagtattgttgtgtttatttaaacctgatctctattatttgtttttctttaggtaattcttaaaataaaaaaatagtaataaatatttgtataagcattgtaatatttacttctcttcatattataagatactttgattatttttataactcaaacttcttaaaaatctaatatatttacagaaaaatataacaacacttataaaactaaatttgtatcactacatctaacattaaacatatgttgatagtcttttattttgtgttgaaaatattattatatttttataaacttggttaaacaaagaagtttaatttagaaaaaaaaagtcaaaataaattaaggtagtacgtatgagttcgtgacaacgacattattagcatatgcctctttttcctagatcaaactattctggacttcaagtacgtccgaattagctcttattaccttcgaccaaaaataatcttatttttcaacccatttcacacatatcatataatacctcccactttaataaacctcattgctattgtctccaactttaacaaattttagtgtatttgttctcctagtcttatgaatttcaatgaaatgattgcttgaaagattaaaatattttaggacaattaagatgatgaaaaataaagttaacttagataatgaagagtacatgtatacgtgtatggacctattggtgacaagtcaacattttgctgacatggtatagtaattaatgctagagacttgattctatctacatactccctccgtcccataaaattcccattcctaccaaaacatccttcattattagaaaaaaagtaatggttataggtaaacaaagagcatttaagggataaaacttatcgttttatatgctgagagtaggtaagaaggtagaaattaatattttgaagaataaaatttaaagtttagaagttttttttatgaagagagtaaagcagaagactgggattctctaattaccttgcgatcaggcagggtctcgatgaattgcttagcgtatatccgtacacccttgatatgtagtgtcacctttacaacaaacttggccccacgctgaaaataacgttagttaattagtgcgattaggaatgtatcgtttgattttcgtctcttataacgtgttagagcaggtacaatagcaggctataagccagctataaacatatttatattttaaagagataaaggaagagagagaagagcagcgggctatagatctgtagccagctgcagtacagactacaagacgtaatgtgtatatgacaggtgagaccatgtattaatagtatagtaaacaactattgtatgaattgactattacattggctataaatgatttggagccagtagcaggctatactattaaacttgctctaatgtatgttaaaggaacacattcgtaagggtgtgagtgtgatattgcgtgtgtagtaatgtgtatacgtgtgtctgctgcgtaatcgtaaaaaaatattggttaattagttcacagcctttaatgagataagatactattttctccattcaaagatatttgacatttagaactaggttcgatcaaacttttaaaaaaatccaccaattaatattttctcaaatacttaaattaaatataataagtgatatgcatagattttttttattgaaaaatactactattgtcgtatcgtaaatttattagattttataacttactataacataaaaatttaatctaatcttatcataaaccttaagtattttaaaggtttttttactgtaaaaaaccttaagggtttttaaccagatggagtacacaaatctctcttttattcatatgtatatactggcctatcgcccatgcattgcaacggaattttaggctattatcatctcttaattgttacgcatatttgttaatcatatgtgtcttttttagtctcagattaatcatttattcttttttaaaaagtagagaattgatgagagtaattgatatgtgagctctctatcttcatattaaaaaaagggaggatagctactatgctctctaaagttttactcctgggtcattttagtctttaatctttcatattgtccaaacaaatcctttaaatttatcaggtgggcttatatagtccttggtcccaccaaaatcgccacgtggacatgccatgccatcctcctgtgcaaaatctatatgatttgtccaatttaaccttacatatatcataaaaaaataaaaaaaggaaaatgttaaaaaaatatatggtatatttaagagcaaaaatataggtcaaaagggtgaaaaaaaagtaaaaagtattttttttcctatggttatgtctaattcaccattacatttattttctatgatatacgtaagggtaaattggaaaattcatcatagattttgcatgaatgatgtcatggtatatccatatgacgattttggtggaccaaagactattctagatcttatgataaagttaaaggatttctttagaccatttaaaaggttagtgactaaactggtcttacagagaaactttagggagtagctaggagttggcagtgaaggtgatggcaaaatcaccatcagtgctcctttatactttcttcgtcccaactcctaaaatatagcaatctagtatcggatggaatgtttcttagtaaaatatatctagagtatagacagattttctatccagatatattgcataggaaatatctattcggtattaggttcttatattttaggacggatatagtattttataagaagtatatatactccctccgtactcgtaaatgaagtcgttttgggcagcgacatgatctccaaaacacaattttgacttcttatttttataaaaaaatttattgaaaagtgatatatgtatacttttatgaaagtatttttcaagacaaatctattcatatattttatattttcaaactcaacaacttgaaaattatttatgatttatatttttaaagtttgatttaagcattgttctaaacgactttctttttatttctttttattttaggagagtacggagggagtaccttcaaaggggcgaggtagttgagattctgctcagagattgccaacgctttgcctgtgcatgctaccgttcttgcgctcactccaagaattgcagccagttcctctcgtgctggacgcacatactccacgtgattaatagtcatagttaattcagtcaagggtagtaactttatatactatatatagggtgcagcaactgattaaacctcgttcgacgtaattagcatagacagcgttgttgacaacgccgtaagggtcgatgtcgcaatcgctgacgctcatctccaactcgaagaacttgcgcgccctgaatttcatccaaaatacaagtaaaaaaagcgcgcatcaacttaattcagggccaattacaggatttcgttacagaggtgtaactaacaatcaacaacaaaacaaaatggacctgctcgacttcagagcacgctcatatttcttcttaactagcagaatattggtgctttgctatggataaaatgctcacacttatataaatatatattattcatttgattaaaaaatatattagtatattatataatttttttattcaccagaaaatatcatacactaatttgtaaaacgagaaaaaataatgatgatggactggtggtagagtcacttatatcataaatattactccatccgtcttataatataagggattttgacattttataaaaatatcatacactaatttgtaaaacgagaaaaaataatgatgatagactggtggtagagtcacctataccataattattagtattttctaaagtagtatatagatatatcacgatatcgggctcctctcttgcatccagcatttcagacactaaagaaattaatattgaacctcaatttggcatcctggttggtgttgtctttggcagagacgatagcttcgcgggaatggaggtccggggcagcgcagagagcccgtgcatggcagcggtgcgagtggcggccggcgaggtgcaggctactgcggcgagagcgcgatgatcctgcacggggcacggcatcatttcgcgggtggctgcaggcgtttgggacgacgatgccaacacttggttgctgcatggtgacttggtgaatgcagtgatggacggtctcctagctttgaaccgtctattatacagtagaggcgaaacattcagttgttgcacgtggtctgaccaagcctggtgatagtatagtctgctgttctcctggttgccaaaatccgagagcagagaacgatcccgagagtgaaagctactggattcgtcggcacagacgccagtccgattggtcaaccagtcaaccctcacccttgccaacgtcaacgttgctcacatattagtacttactctattttttaattgagaacaccattgacttttaaaaacatatttggtcatccgtcctattcaaaaattttacacaaatatataaaatatactttaagtgataaaacaacttataacagaataaattataattatatattttttaataaacgaatggataaacgtgtaataaaagattaatgacgtcatctattaaaaaataaaggtagtatcaatgtaataaaagattaatggcgtcatctattaaaaaatgaaggtagtatcaatgtatcatggacagaagcataatagataaacgattaaacttacatcaggtatgaaacgaggatcagataaaaaataaaaagaagagaaggccacagactgacagacccacatttcaaccacacgcaaaaccatatgaaaagaacgcagaacaacgtgacattgtgggcgtcacggtacgtcgtccttgccctttgcatcgaagttcagaacttgctttttttttcctaatttaaattactccatctgttttaaaatataataacctaaaatcgacgcctcattcgattttagactattatatttttagatgaaattgtcgagagggactattatatttttagatgaaattgtcgagaggtagtatcgaggccttggattcagggtgtgtttagttgggaaaaaggaaatttttagatgtcacatcggacgtttgaccggatgtcggaaggggttttcggacacgaatgaaaaaactaatttcagaactcgcctggaaaccgcgagacgaatcttttgagactaattaagccgtcattagcacatgtgggttactgtagcacttatgactaatcacggactaattaggcttaaaagattcatctcgcgatttccccgtaactgtgcaaatagtttttctttttatttatatttaatgcttcatgcatatgtctaaagattcgatgtgatatttttgggaaaaaaatttaggaactaaacgggccctcaatgcacccttgtcaacgtcaacgtagttcacagaatatcgttgatggacgatgggaccatataattcacagttaaacttaacatcaccatctgttcaaacacaaaataaaacatatgaaagcaaagcagaaaaaacgtgacaaatgggtgcatggtgaggttgttctttgccctcactaatccatctgctgcattatatatttttcaataatagatagaaatccattgtccatatctacaactgatatacacacagtcaaattgttgaattatactccgtatgactgaaatttttgggaagtacaaaaatgatctgacaagttgtagactttacctgaggtggttgatatctatagagagcagagggataccagggaaagctcagctcgggttgatgtgtcgcaggaagtttacaaggcatatactcaaaactagaacgattagaaaatcgtgatattaattactagggtaattttgccttccttgaaatatatctaaagatactacattttctagtataaaatttgatatctctaagtatttagtacctcaaagataacaaaaattttaatgtaaaatttagatacctcaggatactttctcaagtaccatagaacttctctaattactatgaatcaaaaagaaataccacaaaatatttatacatttatatatgtaaaagcggagtagtactatgaacatgaaagcaagtgaagcctgaaaagggaatgttgccttcactactctagtaatcttgtgtactagaacgaattgatataaaaaagactcataatttctctgtgtcacaattggcaaacctctggtactgactagatctgtttgtgcaaactacaacgcatgaccggccaattggccagggatgaaaatggtagtatgaaaatttcagatcgtgtagccgttttcagtttttaccgatcaattcattcactaacggaaattttcagtaactgaaacggtaatgttttccagaaatggtaataaaacagaagaggggtttttccagtcgtttcttcggaatccgttttttgtccggccggtaatttccgaaaaactaccggtgaaattccggaagttcttctctagccaatcatccaccaatgccggctgctgtgggttattcccgtgaaatcccaaccaagcatcaataagacagcaagatcaatcaatttttgctagcacaacgcatcagatcaattccggatatcttcgtcttggacccttccgtcgcttcggcgctacctgccgacctacgttcttgtgccagggtctcatttggagaaggttattacatgggctaaatgggctgaagacttagaggtgggattaggccaaaatcacgagaatatgtctactgatgaggtccgacataggttatccgtagatatgcgatagttaaatacttaaattgtacgcgatgatataatgcgttgttttcgatgtgaatttttggtttccacctgatatcgatatacttctgttctggtagttttattttcactaaactaatagtaccgatatcgttatctttttcggatgtaccgttcccgattttatttcggagaaaaggtaatgaaggtgagagagtggtttttcaacagtttctgactgttttcatttcgtaggcccagtgttcgtataaaacacttttagtgctccctgtggcgcaaaagtacaatgaagataagtttggatattttttatcaaatgttgcaatgaggcacatatatagtatagtaacatccacaaccatacagaatttaattaacttgaaatttgatattggaggcacggtaaaacacacgtacattatatggtgaataacaggtaaaacttgagatctcttctgcctcatgcatcatgcacccataaaccgatactacatcatagcttgttacttcgacgagtcttgtgaccgaaatcattaatcgctagcttccctgtgcgagaagaagtccagcaccttggaggacagttccgggaacacgcgagttggacggtattctccgtcgaggcagacgatggtggccttcgcttccaaaacgagctgccgttatattgcgttgcatgcatcaagagacgggaattaaacgtcgtgacaaacagctcgcgtgcatatgcagatatatgcgattatgcaggttagacatgtaatgtactgaaaatgtaatgcacacgaaaaaaaaaaactgaaccatttcttctcttctcgctaagaaaacgtgcagcagtgcagctagcacttagcatatgcacagcatgcattcactacccccaagactactcctatagatagtcatgatgtagaagtgtccagagaagagatagagtattgactgtctatttagacctgatctctataattagttcatatttaggtgtttttaaatgaaaaaaataaatatttgtataagcaccataatattttcgtaggagcatgtgacgagcatatatatatatatatatatatatatatatatatatatatatatatattatagagtaaatttcataaaactacagatactttgcacaatctatcacaaaactacagattttagaacttgtttaacaaaactacaggtttaatatcttcatttatcacaaaactacagatttagtgtctccattctaaaacatatagttttgtaattttgtgataaatgaagaaactaaatgtgtagcattgtgataaaggaatacactaaatctatatttttgtggaacaagttcttaaatctatagttttgtgatagattatacaaagtacctgtagttttatgataaacgaagacactaaatatgtagttttatgaaataagcttttaaatctgtagttttatgatagattgtgcaaaatacatgtagttttgtgaaatttactctatattatattaacatatgccgcagtgtatttttggttggatcaaactattttggactttctgtccgagttatagcatttacacgtgacctcaggtgacaagtcagcattttgcttatactccctctgtactcgtaaatactttcgtttagaataatgtttaaatcaaatcttgggaatatgaatcataaataactctcaagttgttaagtttaaaaatataaaaaatatatgaatagatttgtcttgaaaatacttttataaaagtatacatatatattactttttaataaatatttttatagaaataagaagtagttatgttttggagaccgtgtttctgtctaaaacgatttttttttatagagggagtacgtggtagtacacaattaatgctatagacatcctacatgaagcactgggaatgctctaattaattaccttgcgatcaggcaacgtctcgatgaattgatcagcgtatatacgtacacccttgatctgtattgtcacctttacaacaaagttgtccccgcgctggaaataatgttgcttaattagtttccagcctttaatgagctaaattactattttctccgttcaaaggtattaaacgttcaaaactgattcagttaaacttttaaaattccaccaaccaataatttctcaaatatgattagcttaaaaaatagaaatgatacatatagatttactttgaaaaataacattgtcgtatcataaattttactataacttctaacataaaattgattattgtaattttaaagtttgaacctagtcttatcataaacctcaaaatttttagctagaggtatttgtcactagtttgaattattattgcaagtctgtcactaaaagtttacaaaaatatcattagaattgtacttcaagtggcatccttacaaaactgataaaaatcagtggcaaatttacaaatgtgcttatattttcttgtgtgtatatgtataccttcagaggggtgaagtacttgaagttctgctccgagactgccatcgcgttgcctgtgcacgctgccgtgcttgcgcttactccgagaaattcagccaactcctctcgtgctacatgcaaatatgtgattaataggtgatattaattaggtggtgtttaggaaggagggactcacaaaaaaatttaatccctataagagaaacttatgtttttgtgagagttcctatgtcccaaacacctccttagttaattccttcgaggatagtaacactgctacatgcaaatattgtaattacagcaaacctcgttcgacgtaactaccgtagacaacgttgttgacaacgccatactggtcaagctcgcagtcgcggacgctcatctccatctcgaagaacttgcgcggcctgaatttcatccaaaacacaaagttaaaagttaaagaaaacgaacatcaacttaatttggcactcaattacaacagctagccaagcaaaatggcacccaaaatgttgagcagcaaagatgcatggaccttaatttgacgtcgtggttggtattgttattggcgccggagaaagctgattcatgggaacagagagcccgtgcatggtggcgcccgacgtgcagcacggcgaggtgcaggcagctaatacggcgagaccgagccgatccagctgcagcacgggccagcgcatgctgcggctggcagctggtgtttggggcgaggctaacgcttggttgcttgatcatggtgagagctaactgagcctgtgcttgatcgatctctccgcctttgggccgtatatatagcgcaaaaacatgcagttgtcgaatgtgaaaaacatgcatctgaccaggtgatggtctctgctattttccggtctaaagtgacaaaatccaatagaggatagtacgatcccgagggtgaagtttattggattattcgagccgacccccttgtcaacgtcagcgtagttcacagattggtagtactgttatcaatggaaccataataaacggttaaacttaacatcgttacatcacctatggaaccaagaacagattaagaaaaggaggccatacggttcaaacacaagcaaaaacatacgaaagcaatgcggaacaacgtgacacacacaggatacttatggggctccatggagtatgggcgctggatcagactaattaaaatgattagatggggctactgttgaaattataagcatataatgatttaacttattccataaataaatcatgacattgcagatgtaaactagattgaacgcatcattagatctacacatgtaaactaagcagtaaaacatgaacagatcaaatacgcgcaacatgtcgaacatataccgaggtggcggaaagaccggttgctcggcaggaactactcacggttgcgagcgtcgacgaagacacgaagcacgcaagcggagaggaaggcgggccgtcgcggacgaatagggagcagtcgcgcgaagcgcttcccaaaaaccttattgccgccttctcccggtgcaggacgtcgaaggcagaggttccggaaacctgctctcccgatcgccggtgcacgccggcgagcgggatggagtagtctatgagcgacagcgcagtacagagtaggaggcaaaccctagattgatttcgcgtatgttgcgtgaaggcggtggctcggtttatatagagatagatcgcctgatcagggcgcccgcgtaaaccgaaccggataagtcacgcgtaacctatccagactccatgccgttttcacgcaccggatttttcggaatgattccaaaacaaaacaaatccgaatttcccgcagcaaaacaaaactgcaaaaggaggctgcatctgcgcaagggtgaatagccaattttgcggaccattcgacgcgtacgtcgtgcacgcgcgccgccggcccggcccggcgaggcgaggcgagcgagtccgtgtgtttcccctcttctctccaccacacatgcttcaagtggctaggagggtatcctcccttttaaggaggtccccctctcctagaataagcaaggtggtactaaactccacatgcatgccatcccatgaggtgggcttttgtgattttacaaagaattaatcttcgaatgggccttagcccatctattaattccaacaatcccccaccaaatctcaaaatcccactgagatttgctttttccaatgtactgtttatataccagcggttcgatggagaccgattaaggttgaacatccacctagaactccaagctacacttactcacaacttgaacaatggactacgccttgaattgcaagtcttgtgcaagcaagtttcactcagagtcttatctagtactagaccgactgtagactacccctcgggtggagcgtataagtcatactcctaggtctttagtaagcttcctagaagattcacccaaaatttctatagactgcgaccaacagtcaagcttacaaatgtgagttctttcaagaatgctctgcatgacaacatcttcgctaattaaagccaacagaactcattaaggcatagccaacctgccttgcagctcacgagagtacatgcatcttcacttagagagggtatagattggtactctcctctagtttactaatgatttgttcttcccaggttctaattcacgggatctccgatcacatagactggattaccaccatagtataactcacatgggtctcaaacccatatacttcgatgcattatctatcacatttcgtgatagtcccttcgtgaagggatctgccaggtttctagctatttggatgtaatccaacgttataactccggagtttcttaatttcctaacagacttcaatcgtcttttcaaatgtctagacgatttcatattatccttagaaccattcactttgacaattaccgtttgattgtcacagttcataaggatagccgacatcggttttttaacaataggcagatccattaatagatcacgcagccattctgcctcaacagtagcagtatccagtgctgtcagttctgcttccatggttgacctcatcaaaatggtctgtttgcaagacctccacgaaacagcaccaccacccagtgtgaagacatatccactagtggctttgatctcatccacatcagagatccagttagaatcactaaaaccctccagtaccgcaggatacccagtatagtgaagccccaattccatagtacctttcagatagcgcattactcgctcaagcgcacgccagtgatcatctcccggattagaggtaaaccggctcaacttgctcacagcaaaggagatatcaggcctagttgcactagccaggtacatcagcgagccaatgatttgggagtattccagttgattcctagcaattcttttgttcttgcgaagcaacaagctaggatcataaggtgttggagaaggcttactatcaatgtagccaaagcgattcaagatcttctccacataatgggactgcaagagtgtaatcccattctcacctctaattagcttaatgtttaagataatatcaactactcccaaatccttcatatcaaaattttgagacaagaatgatttaacctcatttatcacctcaagatttgtcccaaatatctgtatgtcgtcaacatacaagcacagaataattccctcacccccaccatggcgatagtacacacatttatctgcctcattgactgcaaagcctgtagatgtcaatggtttgtcaaatttctcatgccattgcttaggagcttgtttcagaccatacaaagacttcaacaatttgcacactttgccttcttgaccttcaactacaaacccatcaggttgatccatatagatctcctcatccagctctccattaagaaaagctgtcttaacgtccatttgatgaacaagaagacaatatgaggctgctagggaaagtagcacacgaattgtggtcaatctagcaacaggtgagtaagtgtcaaagaaatattcgccttctttctgagtatagcccttagcaacaagccgagccttgtactttttagtagtaccgtcaggcctaaacttcttcttgaacacccacttgcaccccacaggtttacacccatagggtcgctctgtcacctcccaagtcccgtttcactacggacagcctcgttccagtagtctgcatcaggagatgcatatgcttctgaaattgacttaggagtgttatccacgaggtacacagtgaaatcatcaccaaaggacttagccgtcctttgtctcttactccttcgaggagcttcactaacatcctcctcagagacatgttcatgtgtatgttcaatttgttctggtggtgtgattgaactgggaattatttcagagggttggctcgaaccactatgtgtatccttcattgggaaaaagctctcaaagaaggtagcatcacgagactccataattgtaccaacatgcatgtcaggtacctcggatttaactattaaaaatctataggcaatgttgtgatgagcatatttcagaaagacacagtccacagtcttaggtccaagtttgcgcttcttcgttattggtacattgactttcgccaaacacccccatgtgcgcaaataagaaagtgatggttttctcccaatccatatctcatatggtgtttggtctctatttctgttaggaactctgtttaacatatgattcgagatcaacaatccctccccccaccatgccttaggtagtcccgcggtgtctaacatggcattcaccaagtcagtcagtgtgcggttcttcctttcaacaatcccattagattcgggagaatagggaggcgtcctctcatgtatgatgccatgttcctcacaaaataagtcaaactcgttcgagaaaaactctccaccacgattagacctaagcctttttatctttctgtcaagttgattttcaacttctgccttataaattttaaaatagtctagagtctcgtctttcattttcaacaagtacatgtagcgcccgttccgtcgtggcgcctagcgggaaaattatctcttaaaaaccctaattgcgaaatttgtttctttgcttgttgtctagtgtccgtgccatctcaagatctcaatccccgatctatcgtcgagttcaattccgaatccaatccctccaaaccaaattcctccgcaaaagtctagtttgcctcccccgggttcgatgggccgatttccgctcggcccatctctcccccggcccccctctccccgggcgctctctctctctctctctctctcgctctcccatctctccccccccgctcggcctcgcccgtacgctgctcgcgcgtgcgagagccgccccgagcgcctctctccccgctcccccgctcagcctcgcccgcacgccgcgcgcgcgtgcgcgtgagccgccacgccgagcgccccctccctttcccctcgctctgccgcgcctgcagccgcacagccgctcgtcctcgcgagccagcgtgtgtgcgcccgcgcgaacgccgccagttgcttcccgcgcgcgcgtgccgtggtggccgaccgcccggtcaccgccgccgtcagcctctgcacgcgcctgtcgccagtgtcgccgctccgctccaaaccgccccgccgtcatcgccgtcgtcatcgcccggcccccgcccctccccgcgcaagccgccaagggacggagccgcgcccctcctccctctgccgcgatgctcccgttcccctccccctctttttcccgaatcggcaaaggggcaagcccctttctccccctccttttccccttttcctcctcgccggcgtcatcctcctgccgccgctttggctgcaagcgccgagcgccagctcgcgccttaaccgtccaatgtcggttcccctctcccaaaccgacattgccgtccatttaagcccaagccctccccctccaaactccctcattttcgcctccgcgccattgccgccctctgtttcgccgtcgctgatcgtcgttgcgcgtgtcggaggagccggcacaagcaaggacgcggaagaggactccggccgcgccctctccttcctcttccccggcccgaggccggagagattactcccgcgtcgtcggcctctcgtcacagcgccctgtcccgcacggtagtgcctctctccgttcttcctcctcgctccatctccttcccctagctttcggtagtagcttgagtagcctccccgtagttagccggcgccgccccgaccgttgccttcgctcgccgtgtgctcgccgccgtcgccgctcgagccccgtagcacctgcacgtcgccagcctcgctcggcgtagttccgtccaatccgacgctagcgtcgagttcccgacgccgcgtagatgctctcaccgccgggaatcgacccctcgtagcttcgtcgccgttttccccttctcccaccgccggttgccgccgccgcaatccgccgccgtcgagcaacctccggcgaatccgagccgttggttcgtctcccctcgtcacgaacaaccgcccggtgtgctcgcttttgcccgtatcaccgtggttcgctccgtcgctcgccgccgccgtccgccgtcctttcgcggccggatcgtcgtctaccttccgccggcccgcgtggcagccacgtaggcgccacgtcggcgccagctcagcccagaccgggtcgggccgaccccggtcggtctctccgcgtgcgcgcgttccaccgcgagccgtgaggctgcgcgtgggcccgccgcatccgcgtccaccgcaaaccgcgcgcgtgcaccgcgtcccaaccccgcccgcgcgcgtgcaccgcgtgctccctccgcacggtgagccgagccgctgacaagcgggtcccacccaggaccgcgcgcggtgagtccggtccaccggtcccctctctcctcccctcccgcgcgcgctctgggccgccttttgggccggccggcccattaagctcggccgagccgccccaaatcccttgggccgcaccctagccgcccgaggaaagtctaaatttcctccctcctttcttttcttttcttttccaaaaaggatttaattaaatccttttcctttaggccaaaaattcaataatcttagaaattcaatatcttcccaaccgtaaatccgttgactccgttcaacttccaaaattccctaaatctcgagatctatctaatggcacgcttagaggtcattaatagggccttatttttttcgccgtttgttgagttgtcccgtttcgcgtgtagtttcggaacccgaagacccgtagtgcgaggatttcgaggatcaagctccggatctcgagcaaggcaagccacctttgaacatcttgagcctatatttgaaatttaattatgttgcttgctaaatattatgcattgataggatcgcacttaatctgtttgtcccgtctgcaaggcagattggcggacctacctaatttgtcgcatttgatccttcctttgttaattgctataccatgtccccttgtaaccacccagttgcgcctcgatactcgtgcaccctgtgcaagtatcgacggtcgccttcaaacttaaaatctgagtaacaacttgggtaaaattggagttttacaaaaagacttggaaaacccgacacctgggtcggtgcttgcgaactaaatgaatttctaaaaccgcggaccgggaaagtaccgggtgtacggttttcccgctcccgcacttaaggaccgattccttggaatttcatccgaacataagacaagtacgaccacatgggtggaatgggacacccctggctgagtaactagcttatcaggggagccatgatgtcgagagacatgtggattcgccggggtggtgtcggagaggacccccctgggcttcctggcacagtatggtctgggacctaacctgttgttggtctgggacccctctcgtcggcatatggtaagcctgtgtcggctttggaaatgccttgtcatgaaagcttggaggtctcccgacgtggctgatccccacgggctgggtgatccgggttagtaatgtcgtgtgggtaaagtgtaccccctctgcagaggttaacaaactgttcgaacagccgtgcccacggtcatgggcggatgtgaggtgattcctagcgtagtttggtttgactactgcttgtgaaattgctgtgtgaaaaggggttcggtgtttgaaaaatctgcagctgatgggatcagctaggcccgggtggccgtttgaaaagttgttggcccggatggccgtttgaagagttgttggcccgggtggccgttgaaaaagctgttggccgggtgccaaccttgtttaaattctaaagactgatacattgcacatactccgaccggacgggacgcactgtctcaaccgtgtcgtttgagaagcactcacctagatgtttttagaaaaaaaagttcaaataaaatcaattacgaaaacaacagcctttccttgaagcctgcattaaacacctatttcccctggcttgctgagtactcccgtactcacccttgctctatataaataatcccccccagttgctgaagaagatgaagcggatcctgctgatgaggagttcttccaggagcaagccggctacgatgtattttagggtttcggccttattcccaagtcgcgcctgtgttgattggtccaagtcctggcttccgctttccttttgtaatgcagttgtgagctcgggatctgtccgcagcccaacatgactgtacaactactctataataaagagacctctgttgctgtgatattctgtctccctgtgatgccaacactgtttcctgggactggtatcgattaacaggttaatttggagcgtcacgggctagttccggttgggactagttcggggcgtgacagtacacatagcaaaatctagtagcatcatcaatcaatgtcatgaaatatcgttttccacccttcgtcaacaccccattcatttcacaaagatctgaatgtaggagttctactggtgccaagtttatctcctcggcaaccttgtgaggcttgcgaggttgcttcgattgcacacaactatggcacttagaacctttgacaatggaaaacttaggaattaaacacatgctggaaagccaagacatcaagccaaaattaatatgacataaacgtgagtgtcaaacattagcctcatcatccacactagcacaaatatggttcacagatttattgcagaaatcagaaacggaaaagcggaacaggtctccgcactcataacctttaccaataaaatatccatgtttagacacgactattttattagactcaaaaaccaacttaaatccgtctctagtcagacgggagccactaacaagattcctgtcgatagaagggacatgctgcacgttcttcagctgcacgatctttcccgaagtaaacttcagatctaccgtgccaacaccattccccattaggatggtggaaccccgtgcgacctgataagaagaaaacaatgagatgccagcacaaacatgtacattagccccagtatcaacccaccaattagtagactgattaacaaaaaaaacagtaggtaaattaccatacccgcttccatctccagtgttgccaatggtcacattagcagacttagaagtctgccctgtaggtgtgtaacaccctgaaaattcgaccgacaaaatcaaaattctaaaaatacggattttcaaaaactttttaaactaattgcatcatgccgatcttattcgtctattttatctggatttgatctcgaagattattaatcgtgagtaaagaatagttaattaggaataaaccttaaaaacaaattggtaaaataaatacaaaataaagattaggtgggatagaaataaataaaatattatcgcgaccatatttggatcaattaaattttaatacgatggaataagaattaaccctaattaaaactcaaataaattacataaaaataaaatatgagtaatattaatctagggtgaattcattagttaagataacacaaatattgagtaaaatgcatatatgcaaaattaagaattgtggaatcaaatttatacggaaattacactaaaatcgggttaattagaaatcggcactgttcattgcacataaggtgttcgacggggtcccctaacccagctcctcctttttccccctctctctatcgccaccgtcaccgcgcgtcgccgcctcgcgccccgagccgcctcgcgccgtcgccatcgtcgccagccgccccgcgccgtcgccgtcgcgtcccgccccgcgccgcgcgtgcatcccatcgccgcctcgcgccgcgcgccaccactgccgcgccgtcgccgtcgacatcccgtcgccgcgtgcgcgttccgtcgccgcctcgagccgtgccgctgccgctgccacgccgcaagcccgcgccgcgccgtcccatcgttgcggtcacgccgtgccgtcgtgtcgccgcccatcgcatcccgccccgagccgcgcgccaccgctgtcgctgtcgccatcgacgtcccgtcgccgcgcgcgtcccatcgccgccccgcgccgcgcgtcgtctcgtcgcctcgcgccacgagcccgcgcctcgcgccccgcgccgcgccgctgccgcctgccgcgccgcgcgccgtcgccatcgcgtcgcatcgccatcgccgtcgccatgcgccccgcgctgtgccgcgcgccccgacctcgcgccccgtgccgccgtcgcgtctcccctcttccccttatttcttcccctctcccctataaagaccccgacccaatcccccttctccaccccactctattccctcctcttctccctcttccccttctccacgcgccaccgtcgtcgcgccgccgcgccgccgctatcgtgccgccgcgccgtcgccccggagccgccacgccgtgcgtcgccgccttgcgccgccgtcgccgtcgtcgccgccaccgccgccgccggtgagccgtctcccctccttcacctcgcgcccaccgccatcgccgcccggggaagcaaagagccgagagagagagagagagaaaccgagggagggaaaggagaaggaaggagagaaaccgggagggagagagaaaaggaaaaaagaaaaagaaagagagggagagaaaagagagaaaaagaaaaaaaaggagagaaaaggggaaaatagaagggaaattgggggagaaattaggaggatttaggaaataaaaatggtcggggttaatcatagattatttttggaaattccttgagcgtaatagtatttcggtcgaaattctgagttaattataaaagtatgtttcttgatcagattagattaaaattggtagtaatttagatataattaataactaaacaattagaggaattcttatagattattatagattatttttggtaatctctataagtcatcggttcacggtagaaattcggatttaattactaggaatcttagtcgtatattatatttaatcgtttagtcatagactaaattaaattgtataatatttctaggatttcgtccgatatttagctcgtaatagaaatttctaacctattatatggatataatgctcgggaagagtaaattaaaaacttatgacaacaaaataattatacccgcaaaatagtttaaatcgaaattgggtttgccgtagttcgcagatagtaaagttaataaaaaagtaatcgactttcgcattcgactttcatttggatttatttggatttttatttgaattctaaccgaattcaaatcaattttgcacgtaactatagagcccgagggagttacggatccaagcgaaggccaagacccgcaagactttgagcaaggcaagtcatcactattccttgaacatgttgatcctaattgcgaaattgttttgtttacaaataaaaattgcatgcaatgatgaacatcctacttatgattatgccatgccttgattattgtttacccttaaacctttgtaaccatgtttacgtatgagtccctagtcaactatgacaattgcttagaaatgctattctagaatcatgcatactcatatttatcaaatgctatatgattggacaattaccttcgggaaggtaattgagatgcggcatgtggagacatgagcgccacattgccatgatgttgatgatatgatttgtgaaaggagaaataaaattaaaacaactgttttcgactggggcggacggaggatttgggtggtatctggaaaaggctagtaccgtccccagtcaattaaggaccgagccatgaagttaagcatgaaacgacccccgtacaaccgtacttctcaaatgggtatagacctagcggattagatagccgagcggaggcagcatccctgcatagatggttcacccctgagtgaggcaggtgcgctacgatgggacagccgttaaggtagggccgagaagcgtgccctacatcggtgtcaccattggtaggactgccatgagtgtgtgagagagagaacttaacttgaaccataatttaatatgcgtgtgagacttctctttccccgggagcgccagaactcctctcactgctagaaacatggacgcctagagtgcatgaggatttaagttcatggagcgggtactgccaatgcgaggttatcgaaaagctttgccgtgacgcgtctcatgtgttgggacgaggctcatgtgttgggcagtcgcagagtgcgggtaaagtgtacatccactgcagtgtgagtaaaccaaatctattcgaatagccgtgctcgcggttattgagcaccgggacatgtattacacttggctagactctaaaattctttaacttgtgtgggatgggatattgcatgatgattttttttatgctgttggagccacttcctgagaggcgggaaggtggacgtccttagaaaaccatgacgactcaatggcgggaagctatccttgggatcacaatggatggtggacagaaccatcattgttttatatgaacaatggtattaaaacttgatcagtctttgctaggtcttaggcttgtgaaaagaattacaaaacttgctttgcgcaaatgaaccatagccatcctttgaaatcctctgtcatgtgcatcattgctgtggtggcttgctgagtacggttggtattcacccttgcaaatataaaattaatcagaagcgggagatgaagtttcggaggatccctatgcctactaccaggagggagatgaagacgatggcgcccagtaggtcttagtacagtcgttgcctgtggcaatggcatgcccctgttatatgcattgttgctgtggtggcttgctgagtacggttggtactcacccttgcaatatacaaacttaatcagaggtcggagatgaagcttcggaggatccctatgcctattactaggagggtgatgaagacgatggcgctcagtaggtcttagttacggtcattgcctgtggcaatggcgtgccgctgccttaactccgctgccttatctacttctgtttttgggatgtattctggaccgctcggtccgatgatttaagactatgcctgcgggcttatgatgtaataattcgtattagacactcgtgtatgtgcacttggtatttcaactatgaattcgtgtgtaccagactacttgatccagggaaatggtactgtttacacgattgattcctgttataaaaacgggggtccacaaggtgccttcatccccttacgctgtggacactttctagccagatgaccaggttgcccatacacaaagcaagtcctctcatcctggttaggattgttgtttttcttcttctgcttcttgaagttggtggtctgttgagctttgtatttccccttgctcttgttctgggccttgtgcacaacattggcattggactgcccaccatcgcccttagacacgacgtctttttcccgagctttctcctcaacatcaagagatgctatcaaccccttaacggagtattcctgtctcttgtgtttgagtgcagtaccgaaacttctccatgatggaggtagtttcgcaataatgtacccggccacaaatttgtcgggtaagacacacttaaggagttcgagttccttagccatggtttatatctcatgagcctgttcgactacagaacggttgtcagtcatcttgtagtcatgaaactgctccatgatatatagatcattgctagcatcagtagcaccgaatttagtattcagtacatcccacaactccttagcatcggtcatatgcatatacacctcgaccagacgatcgcctgatcagggcgcccgcgtaaaccgaaccggataagtcgcgcgtaacctatccggactccatgccgttttcacgcaccggatttttcagaatgtttccaaaacaaaacaaatccgaatttcccgcagtaaaacaaaactgcaaaagaaacaaaacaaatccaaatttctcgcagcaaaacaaaactgcaaaaggaggctacatctgcgcaagggtgagaagccaattttgcggaccattcgacgcatacgtcgtgcacgcgcgccgtctgccctgccaggccaggcgagcgagcgcgcgtgtttcccctcttctctccaccacacacgcttcaagtggctaggagggcatcctccctttaaggaggtccccatctcctagaataagtaaggtggtactaaactccacatgcatgccatcccatgaggtgggcttttatgattttccaaagaattaatcttcgaatgggccttagcccatctattaattccaacagctacagtagcataagagaaaggtcaataatatagccaaccgctggttgcctactccctccgtcccataaaaagacgatttctaggggggaagttttgtcccacgaaaaaccaatccctgctcacaaaacgagaaacattcaattaccccgtcctcatcggttctcccccatcttatctcctcccaccaatttctctcctcttcagaaatcacgttcacacgacagtgccttcatcgctctgccgctccatctccctctccgccttctcccgttcctccccgcacctccctcccgctccaccatctctccctgtccatggccttccgcatcaatctcgatgtggtgatagaggcataagcttgcaaggagggagatccaacgcagccgacggtggcgtcggatggatgcggctcggatgcgatggtgaaggtgagagtgacgagcggatgcggcgtcgatggcgggggcggccacgagcggaggcggcgttgtcggcggggacggccacgagcggacgcggcgtcgtcggcgggggcggccatgagcggacgcggcgtcatcggccgcggcggcaacgagtggacgcgggcgttggcgagatgctatagtatttctctttttctctgttcttgctcttctctgttcttcttgatacttgctagttcatgcaagcatttgttttttctgattaactggagatgttatcttttcttcttgcaagtgtaaaatttgattagttctttttttttctagatttgagatatgtttcttctttcagcattgtaaatttcacaaaaaaaaagtcttcttttcgggcacagatgcctgtgtatgcattgtagtactactgatgaataggtacagagagtggcagtgacgatgaatggctgtggttaataagggcactttggtattttcacttcatccctaaacctgcatcgagaatctaggaatcgatactttctgggacggagggagtagtagtagtacaatcgttagccaccgcatgactagtatatgcattcaaccaactagatgacaaacatcagataataaaagaaaaggagaggaataagaaaatgacaagtaagaagctgttcctctcgtcgacgatgagatcgaaagtatcaacggggcacattaaattacccttaatttttttggcaccactgctcgtcgtggtgaggcaagctccgcttccaacctgtttggaactccggccggcggccagtattcctctaatgatctaatccgcccatgcaccaacacggcaacaccaccctggcatgcatcgatctggatattggcagcattttcgtgggcgtggctaatgggctatcgatccccatccccctatacactcctctccccttttcttctccacttcttctcttcctactacatcataaatttaaaaaaaataaaaagacaaaattggaaaaaattatgtataaaatactatatataaaaaatatttgaattcaaatttaaatttgaaactggtatgtaaaactttggatctataaactaatatttaaattcaaattcgaatttgaaacgggtatgtaaacttttgacttataaactttgggtctataaactaatatttgaattcaaattcaaatttgaatcgggtatgtaaacttttgacttataaactttagttctataaactttaggtgtataaactttagatgtataaaaatactatatatataaaatatttgaattcaagttcaaatttgaatcggatataattcaaattcaaatttgaatcgggtatataaacttttttcttataaactttaggtctataaactttaggtgtataaaatttaggtgtataaactttagatatatagaaatactatatataaaaaaaatatttgaattcaaatttaaatttgaatcggatatataaacttttgacttataaactttgggtctctaaactttaggtctctaaattttagatatgtaacttgaggtgtacaaactttaggtgtataaatttactaaaataggaaagtaatgcggtgaaaaaaaaaccacgtggaggatgggggatggggatcgatcgccccgggcgatcgctcgcccagtaggactagggatatttggcgtagcagcggaggagggcagagcacagggaatatatcgaatttatttcattctaaaactaaacatacacatactaaatcatcattctcaaattattttcatcatatttcaatccaaatcatttcatcatttttccaatatctaacatatatatccacagtaaagcgtgagacatcatctagtttttcatatatgtgtgtctagttaagaatagaaagcattctaaatagtaatggaaggtaattaaactaccccatccctcacggaaaatcatggaaatatacggaaactaagtatttggatatatggtaatatatctctaacatcatgggaactaaagtattttaaaagtagaaactaagtatatttggaatttccgtgtaatatagaaactaaatatttgaaaatattacttgaaaatatagaaatgggcatattgcaatgaacacgtacctagctaatcttgccgtgtatgacgtttttaatttccttaattattaatgtgaggtacgtcttatttccaattatagctcacgcacagttttttaattatggaacatgattcatatgcttttttgggttattttttagtatgctaaaattttgggttttcgtacctaattttgccgtgtatactgtttttaattttattattattgtgaggtctcatttccaatttcacgcgtggtttttaagtatgtggtacgaataccgtttgcaattttcacacatggtttttaattaagtatatggtacgaaattgccgtttgcaattttgggaaatgtatcgaaacttgagttagtaaaatttcgtaacttctatgcgagggtacatatttttttcctcaattttctgggaaattttagtgaaattaattatttaaaatgaataacgaagaactaaatatttgaagaattctgaatgtagtatgtacagactatgtggttaggtatgcgatttttttattaaataagtaataatggtagatagaattatcttaattgattatttcaaaagataggtgagaatttaggtatacataacagaatcaatatacaaatgcaaaaataaaactttatttgactgtggtccaagaaacttcatcataataagcattataaatgatgttttaaaagcgtcttctcatccttggacatgcttcctctacgttgttttgaaagaattcaaaattataaattgggtacacatacttgcccacaaaaatattggaaatgaaataaaattgtttaatttaatgatttcgttcctaattaagtcctagtcatgaataaaaccccaacatatacacgtgacgcaaaacgtctccaatgtacttgtattaaattttcaactttgactttattaaatatacattaactttgcttgacagtacattattacatacctaactaattattagcctggatagtacatatacaaaattaaacttttataaaaaaattccaacatacacatgtgctgtgtacattcaagtagaattaaaaatgcaccaaagcaggaattctgaaaaccttggtcgtggattgcactcgacatacacaagtgttgtgtatgccaggtaaatcaaatacttttttgtacggttttggatcgaaaaaccggccatacacacattctggtttgacacaaaacccttagagaagcctggattggtcgtgtgggaccaacgcgacccctttgatcgattttgcaggaccgactttctttgtgccatctcacggggtagacacaactagggctgtcaacgagccgagcttgggcttgtctgcctaggctcgagctcaatacaagctcgagccgagcctataaaatattcgagctttccgacaggctcggctcgagctcggtcaagcttgagctcgagtaccgagcttgattttcaagtaaaacaatatatatttcaaagataatctttaaaaaataattaatttcaagttaggcatacaaatatcatatttgatctcctaatttattaaataacaacaaaaatcatatattactaggctcgttagaagctcgagctcggctcaacaaagctcacaagcttaggaagaggctcgggctcagctcgtttgaagctcaagctgagctcgaatcgagccttggatgagccgagctcgagcagctcgcgagcctcgagcttttttaacagcccagacacaatatacatactttttttaaaggtaaaaattcaacttacacatgtatagcgtaagtgcaagcagagttaatttttaaaatgcgcattatttttaaaatatacattacttttaaagcattattttaaaatatgttttttattataattttaactataactttactaaaatatatatattagctttatttcacaatccactattacacacctacctaattataagttttgatagtacatacctagaatcaaattaaaaaaatcaaactaagtttgtttgaacttgtgagtaaacgttttaatgttgatacctatttattttaagaaagtataaattgggtatgtactctcctacaaaatattggcaataaaataaaattgattaattaaaagatttcattaataattaagtcctagtcatgaataaaaacccaacatgtacacgtgatgcaaacgtctccaatgtacttgtattaaatttttaacttttgactttattgaaatatacatttactttatttcacagttcattattatatacctaactaattattagtttaaataacatttgatgacgaatcaagtcacaataaaataaatgataattatataatttttttggataaggcaaatggtcaaacgttagacaaaaagtcaacggtatcatacattaaaatagggaggtagtacttttttactgcatttggataaaaaaatcgaccatatacacattccaagtagacacaaggtgtccttaggccatggccaacactccatgctagagtgtgatctcacccctcccgaagcgaatattcgcgccagcttggccgggaccgcgccctcgcaaagcgcctcaaccccctgcagagcgtcgcgtagattcgtcagcttttggcgaggaacgggcaaggaaccgcgttgggggagaggtgtcgccttgggacgttatggccaactacctcccgcgccaaggacaaagatggctaggatgtacaaggggagaagaagatggccccgatcccactgccgccgcggctcgatccgtcgttgccgcctcgatctgccaccgccaccgctcgatctgcaccggggagagaggcggcgccgctagggaggggagcaccggggagagagggccggggaggggagaggcggcgctgtcagggaagggagagccggagagagaggaggcgtgggaagagattgggaggggagatatggtgatgagaggaggggttgatgtttatatatgtttgtgagttttatgggatatactgtaaatattggacttatatgcgaataaaattaatctaagagtttaaatgcaaaatatagacgactgaccgatactgacttgtaaaaataagatggaggtaaggcttgtattgtgtgaggcatatacttacccagatctttgatcatttctgcattggtcatgtgggaccagcacaatcccatatattggttgattggttgtgcaggacggaccgtgtccgtgccgcggcgcggccacggtgctgctactgaccttcagccaaataaaactagaccaacggattaagatggtatgccacatttaatcacttaattaaagaaaactcctgaacgagacgtgattaaggccctgtttggctccacccctgctgtagctggagctcagtcaaacagtttcagctctatttaaaatggcagttgagctaggtagagttctctcacaaaataaactagagaggtggagctaggttcaggctgctccacaacttctctacagacataactcctagagctaaatttagggcccatttagtactgctccaacacctaaatttaattccaggagttgaatctggagtggagttgtggagctatctaaacccagcttcacaactctagttcattttattagagagcttcactgtaacaccctgaaaattcgaccgataaaaatctaaactctaaaaatatgggccttcaaaaactttttaaataaattgcatcatgccgattttattcgcctatttcattggattttgattttggagtttgttgatcgcgaataaagaataattaattatgaataaaacctaaaattaaatgagcaaaataaataactgaaatataatttaaaataaaggttgaggtggggatagaaatgaataaaatattatcgcgatcatatttgtattaattaaatctaaatgcgacggaatgagaattaactctaattaaaatcaagtaaattatataaaaataaaatatgggtacaattaatctagagtggatccattggttgggataatacatatattgagtaaacttcatttatgcaacatttagaaattatagaatcaaatttatatgggaaataaactaaaatcgggataaataggaaaatacactgttcattatggcgcaggtgttcgatgcggtccgtagccttccccctcctctcccaccgctgcgccctagccagccttgagccccgcgacgccgccgcccgtcgcgtcgccgccccgcgccgtcgccgccccgcgccgtcgccgtcgccatctgccgccacgcgccgtcgccatcgccgctgccgcgcctcgcgccccgcgcccctgccccgccgcgcgctgccgttccgtcgcctcgcgtcgtgtcgccgtcgcgtcatccgtcccgtccccgcacgccgtcgccatcaccaccccgcgccccgcgccgctgccacgctgtcgcgtcgccgcggccgtctgccgctcgccgtgcgtgtcccgtcgtcgtgcgcgtcccgtcgccgcgcgcgttccgtcgccgcctcgcgccccgtgccgccgctgccgcgccgtcgccctataaaaaccccggccccttcccccttctccaccccactccattccctcctctccctctcccccttctccacgcgccgccgtcgtcgtgccgccgcgccgccgccttcgaagccgccacgccgtcgccccagagccgccgcaccgtgcgtcaccgccttgcgccgctgcccccccccctccgtgcgcgctgtcgccgccgccgcctcgagtagggagagagagagccgagagagagaggaagggagaagccgagggagagaaggaagaaagaaagaaggagagaaaccgggagggagagaaagagaaggaaaaaagaaaagaaaagagagaaagagaaagaaaaagaaaagaaaagagagaaagagaggaaaatagaaaagaagaaaaggtgaaaatagaagagaaattaggggagagattaggaggatttaggaaataaaaatgatcggggttaatcatagattatttttggaaattcctagagtgtaatagtatttcgatcgaaattccgggttaattatagaaatatgtttcttgatcggattagattaaaattggtagtaatttagatgtaattaataactaaacaattagatgaattcttatagattattatagattatctctataagtcatcgattcacggtagaaattcggatttaattactaggaattttagccgtgtattatatttaatcgtttagtcatagactaaattaaatcgtacaatattataagataattttaggattttgtccgatatttagctcgcgatagaaatttctaacctattatatggatgtaatacccgggcggattaaattaaaaacttgtgctaataaaataattatgccacaaaatagtttggggatggatggagttaaacaaacggagtagctctatttcacgaacgaaaatagataatgtaagaaactgacttccgcgcttgatatcttcttggatttacttggatctttatttgaattctaaccgaattcaaatcgtttcttcgcacgtaattatagagcccgagggagttgcggatccaagcgaaggacaagacccgcaagactttgagcaaggcaagtcatcactattccttgaacatgttgatcccaattgcgaaattattttgtatacaaataaaaattgcatgcaatgatgaatatcctacttgcgattatgccatgccttgattattgtttacccccttatttcttcgtaaccatgtttatgtatgggtccctagtcaattatgacaattgcttagaaatgctattttagaatcatgcatactcatatttataaaatgttataagcttgggcaattacctttgggaaggtaattgagatgcggcatgtggagacatgagcgccacattgccctgatgttgatgacatgatttgtggaaggacaaataaaattaaacaactgttttcgactgaggcggacggaggatttgggtggtatccggaaaaggctagcaccgtccccggtcaattaaggaccgagccatgaagttaagcatgaaacgacccccgtacaaccgcacttctcatatgggtatagacctagcggaatagatagctgagcggaggcagtatccatgcatagtggtttcttgatgtgtgaggcaggggctctacggtggggtagccattggtaggaccgcgaggcgggtgtcgccatcggtaagactgccatgtgagaatctaaacataattataacctaatgcatgtgagagtcttcccttcccgggtgcgccagaactcctctcactggtagaaaccgtgtacgcctagagtgcatgaggatgtaaagttcatggagcaggtactgccaatgcgaggttatcgaaaagctttgccgtgacgcatctcatgtgttgggacgaggctcatgtgttgggcagttgcggagtgcgggtaaagtgtacatccactgcagtgtgagtaaaccaaatctattcgaatagccgtgctcgcggttattgagcatcgggacatgtattacacttggctagactctaaattcttaacttgtgtgggatgggatattgcatgatgatttctatgctgatggagccacttcctgagaggcgggaatgtggacgtcctcagaaaaccatgacaactcaatggcgggaagctatccttgggatcacaatggatggtggacagaaccgttgttgtttaatgaaaacactggtactaaaatttgataagtctgtgctaagtcttaggcttatgaaaagaattacaaaacttgctttgcgcaaaagaaccatagccatcctttgaatacccctgtcatatgcattgttgctgtggtggcttgctgagtacggttggtactcacccttgcaatatacaaacttaatcagaggtcggagatgaagcttcggaggatccctatgcctattaccaggagggtgatgaagacgatggcgctcagtaggtcttagttacggtcattgcctgtggcaatggcgtgccgctgccttaactccgctgccttatctacttctgtttttgggatgtattctggaccgctcggtccgatgatttaagactatgcctgcgggcttatgatgtaatgattcgtactagacactcgtgtatgtgtacttggtatttcagctatgaattcgtgtgtaccagactacttgatccagggaaatggtactgtttacacgattgattcctgttataaaaacgggggtcgacagagctggtatcagagccatacgactgtaggaaaagaccaaaaggcgccccaccccttttctaagttggccaagggagaaattcccatttagtaatactttcaaaaataaaaacgctatgtttacaaaactctgtacgatttccatcttactcttaactatttcttcacaaaacgagttttactcgtagctgactttgggtttttcttaaaactagatggcagatcaggattcacccgctacctgggagatgggcgtaccccgctcagagggatacgtcattgagctacaccggctgatgaggcgtctgcgataccccagatttccgatctaccgagtgagacagtgtggatctgtttgggaggctcgggtcgaggttcacacacgagttccttcagagtcagactaccgcttcccgacacgccaccgtcgcgatttaccggagaccgcgatgcaggatgcagcccgggaggccttcctccgacttagctctatccaccgagctgagttggctagtactgagtttgctcaccacccgtttcgagaggagagcaactccgtctgcacagttcaggacacaccttgctgctacaacccgatagtgacccgactgtcacgatgggctgaggcagtagacgacttttacgaggaggctctgttagagatcaacgaccagcagaggcgtgttggagagttagagaccgaggtgactgacctcacagtgcagcagcttcagctggaggaggagcaccaggcttggggcagtgagatagactcactgaaggcacagctccaggtccacggcgaccagttccagcagttatctgaccagtacaacgatcgccgcgggatgatggatacacttgaggagcaactgagagagagtcaggagcacgtcagccagcttgaggagcagcttcgagcagccacggtcagcaccccaggagcttctacttccacagcagtagggcatgaccgctacttcttcctcaccccgccgtacccaccagcgttccacgctcttttgggagaggtcagtatgctggctactgagtcagcaccttacttggtggacccgacagtgacacagccacctgccccggagattgtgcacactccactgatccctaccccgtcaccgcagctgggttgcagtatggagactccgatccaggtcgactccgagacagaggagaccaacaccgagccagagatcgagccagacatcactgatccttcagaggatgagacccctgttccccgcatcaccttcatcggaggcccttgcaccctcagcactgctcacaagaacacacgacctccgggcaagaagcccaagccagatccagaggccactacttccgagccgtggggactcaggtttgcccgtgccagcgaccaccctctacctgccccaggatcctgcggatggttggatgactagactggagaattattgcagctgcgatctcgcttcagatggtttttggatagtatgcgagacaccccccttacctagattgacgagtagcttgatggttagttcgatgtatcttttggatgaaccttatttggactgcgtatgtgtgcagtcgattgcatcatgatttatgtactatttgtggaactctgtgatgttatttatgatattattgttgttgtgttataaatgagtttattccaccatgcttgcaaaacaaagttcccatcaaaacaactcccttaatgggataaaaccataagagctagttagaaaattatgatacttacttaatcggcctacacagatggcaagccgacgtcgggcgtcaaccagcaatgaagaaacttagacacctgacttaaccaccctggccggagttatggccactcaaacccaacttctgcaagccattgcaaataatcaaggcaaccgcggcggatcgagctttggagagtttgtgaggaccaagccacctacgttcgctacggcagacgagcccatggaggcagaagattggctacgcatcatagagaagaaactgactcttgtgcgggtacgcgaagccgacaaagtgatcttcgcagtaaaccaactggagggacccgctggtgattagtgggatacttacaaggaagctcgggaagaggatgctggagaacccacttgggaagagttcactgcagcattctgcgagaactttgtgcctgctgcggtaatgcgtatgaagaacgagtttagaaggctacgacaagggaacacaacggtgcaagaatatctgaaccggttcactcagttggcccgctatgcaattggagacctcgcagatgaagaggaaaagattgacaagttcatagaagggctgaatgatgaattgcatggacctatgattgggcaagaccatgagagcttccagagcctgatcaacaaagtcgttaggctggagaacgatcaaaggacttgtcacgaccgagaaaattgccttttcccgaacgctagtgtattaatccccgtcccaggaaaagccggggtacaccacacaaacatgttataaaagacacatctttattatatcgataatatttacattattacaaaggcgcttcaggcctggcaatcaaaaataaacagcagcggactagcgggcctacggctccatcttcacaggcgctcaactggggtataagccaggactccacctaagacatcttctccaaagcttctcttactgaagaggggaaagattgagcaagaatgagtacaaccacagtactcagcaagccacaccggtagatgcgtaataagtgcaagggggtacaaggggataataatataggggttaagctttgcagtaaacagcatttaaaagtcacttagttgcccaaagccattttataaagacgatcctagagctacacagtattattaatcaaggccgtgaacccacacgaacctgccttaacccaaggtctacgatgattcagaccgaactggcaacccgaccctgggtcccagctcgtcccaagccaacccaggccaaccattccacattttagttgttaagcaaattttaagaattaaaacactgacttgggtacattgctcggcttgcccataaccgagggcgcggctattcgaatagattatactctgatcagaggtgtacatctttacccacaagacacatcttcctcacatgtaaccacgtgccacataccaccacggtatacggacggaagacgtgacatagtttccaacccatcctagccatagacaagagtaccgacccaaccccacctacggccggaacctccgggacaggtaggcaggattgagcccctagcagcaggacaccagccctgtgccatgacatctcgactaccgggccgcagctcgtgtagccttcatttgtcctagagatgtccatcgacccccgacttcgtccatctccatccgtgtacttttgtttataaccagactgagccacaaactaagccttacccactagacatgtggaagtacggtagtgctttgcaacagaggcccgagcttaatccttatagtggccggggtgctacttcccacaactggcatgcacccaaaccccaccggaaaacaggttttaggggttttgaaagaggaagagaggtgtatgtccaattccaccataagccaaccattccatagtgtccaaatgatatgagaattcccaacgtctaaagttataaaaaccacctaatgttgtcctattaatcagcgaagcatctacctaaattcatactagtggaaccaggaatagagtacccactagttgggggtttgtttattctagggtgaacaaggtaataataacaatagcaataataatgtcttaacaaaggtaaataggcatggctaaataaaacagtgataacgcgggaatttaaataaagcgataatgcattaatttaaatcaaaataattttataaactgggattcaatatgctcaaggatgatgtgacttgccttgctcagagagaacggccttccgaaccttcggcgacgaccacgaaccacgcttcgggaacctccggaacgacgaaagctacgcgaagcacacaagcaaagctacaggcctataaagaagcaataacaacacataaaaagaaagcacacagttctttaggttataacaaacattaagagacttgaacgggtcgattcagagttcgtatgaccaagatatgatcatccgaagtttaatgctgttacatggagatttgcggattattgtaattaagctttgcaactataaaacatgtggaagcgctagcctggaaaagacaggaaggctgcgctgttgacatgcggaccccacatgtcaacctaaaggaccacggtagaccgagtacacagagacggtccacgggtcgacggaagcggaccccgtgtgtcaaccgaggcgaggggccaacaaacggactccactagacaccacacgggctgcacacgtggaaaccacgtgactaccgagcgggcacactaacacggtcaccacacgcacaagcgaacgactaccgacaccggttcacgggtaccggggtcgacaaccgcacaacaggcatgggtgacaccggaaggacgaggacggggcaacgagaggagagagatccttaccaccacgcgacgaggcgtgggaacgacaacaacgaacgggcgcggcggaggcggacggcgagggaacgacttcggcggcgatccttgaacgaaggcgagacatggccggcacgaggcttgacgacgcggaagcgaggacgaagacgacgacggggctgcagcagctcgcttgacgaaccacgggcggcgaacgcgatcggcttggcggagggacgaacgccacgacgaccgggaacgacgggaggacgacgacgacgacgaccggggccggcgaggagacgacgagggcagccggcagtggctgcacggaggcgaggatgccgtggaacgcgccgctgcgatgccgacgacggaggcggcgccgcgagacgacgagccggcgagaaggaacgatgacgacgaacaccggcggggttcgatcgaaggggaggcgaggccgagggcgaccttgccgctgcgatgccggaggggaagatggcgacgtcggccggcgcacgggcacggcggaggaggctgccgaaggcgacgtcgacgaggaggaaggagaggccggcgcgggcgacggcgttctggcgaaacagaggagcagctggcggtgaggacaacgctgcgacatcgacggaggagatggcgacatcgatcggcgtaccggcgacgtacaggagccgaccggagaccgggaggtactggacgccgacgaggaggccactccggcgagcttcgggcgaggaggaggtgatgccggggaaggaggcgatgccgtggtgtcgacgaaggagacggcgacgtcggccgacgctctgacgagggacagcagccggctggagggagtacagtggccccaatgccactggttgccggcggggacgcgtctccggcgatttccccacgaaccggaggcagcgccggcgaagaggaggcggctgcgacgccggggaaggtgacggcacggccgggcggcgctcgggcgaggagggagaggcggctggaggcggccggcacggaggaaagagaagggcgacggcgggaacgcgcctccggcggtcatcgcgcgaaacggagggtaggccgtgggagaggaggcggctacgatgctggaggaggcgatggcgcgaccggacggcgctccggcgaggagggagaggcggctggagacggccggcggcacgggagagagaggaggacggcggggagatggctagggaccacggggaggctcgggatggggttaaaacgatagaacggaggatgaggatcccattttatagcggagggaagcaagccgggcatgggagagggcggaacggcgacgggaatggcggccggcggccatggaaggtggccggagttggcgcgtccgttcccggcgattgggggcgccattcaagggggaattaagggggaaagagagaggagggaaaggggattaattccccccaattaatttttgaatccaacgcttaaatcgcgcggattcgagggaggaacgaagctagggttcacgggagagggagagaggaggccgggcgggaggaaggagacgaccggcctggcgcgtgggcaggggggtggctgggtggcgcggcttgggccgggacgcggcccaggcgggagggggcagggcggcctgggccgggcaggccgggaggggagggaggaacggcccgagagagagaggggagggggagggagagggagagaaaaagagggaggggagagggacttcggccgcgggccgagagagagagagaggactttgggccaaacttggcccaaagggaaagagagggttatttttaggtttttctttttaatagactctgataattgtttttgttgcttaataaatatttccggtgctctgaaaattcaagtaaaatttgagggctcctttttagaccaaggagaatttaacaaaaattctccgagccacattcgaatttttcttgtacgtattttagtgtttgccaatttctttttgaattttaattaattctattattccttttagcgaatgatttttaattcgggatgaatttatcaggacgtgacaggactgtagagcacaaccgaaagaggaggcttgctatgaatcgcccacctcagggagtgcctcagcgactcaagggagccccttcgtctgggtggaaaccccctattgtggcgaccaaccgccccgccgcacctagcaatttcaacaggccgattgcgattcagaaccacacccctacaccaactttggctgcccttggagccaagaagaatgtggactgtttcaactgcggggagtatgggcactacgccaacaactgccctcatccacgcaaaactcctgtccgtactggcgctaatgcaatgactgttcgtggaactactacccctgctgctagacgaggtctattcaagactccgcaaacaaacaggaccgctaccggatttggacgcggacaagtgaaccatgttcgagctgaagagtcccaggaagatcagggcgtactaatgggtatgttctctatcaattctaccccggttaaagtcctcttcgattctggtgcatcgcattcattcatatctttgaaggctagtcaaaagcacaacttaaccctagtgggacttagaaagcctatgatagtacactcacctgggggcgagataactgtgagtcatgcttgcatagacgtacctattcgtcttagggatgtggtgtttccctccaaccttatggttttgataccccagaccctggatgtcatattgggtatggattggttaacaaagaacagaggggtgatcaactgtagacgtagggaagttaccctgaccacaccctggggatcagacatgagagcaactatggatcaagatcctagactaaccgaacgtgccggaggcatatttaccatgctacccctgaaaggattgcctgtagtgcaacgatttcccgatgtgtttccagaagatttacctgggatgccaccagatcgtgacatagagttcattattgatctgataccaggaactgcccccatatccaagagaccttatcggatgccggtcaatgagttggaggaacttaaaaagcaaatcagagagttgcaagaaaagggatttgtacgccccagttcgtcaccttggggagccccagtgctattcgtcaagaagaaagatggtagcatgaggatgtgtgtagactaccgttcactgaacgaggtaactatcaaaaacaagtatccactaccatggattgatgatcttttttatcaactcaagggagctaaggtgttctctaagtttgaccttcgatcaggataccaccaattgaaaattaagaccggggatatatccaagactgcgttttcaacatgctatagattgtatgagttcacagttgtcacgcccggaaattcactagtaatttccgaacttatttgtgcataaaatcctcgtccaggaatcagccgagatacacaaactgacaatttaatatacaaatccatcataataataacgttacacacttacaaaagaaaagaaaacagcagcggaataacggtctagcgatggcttcagctccactcccacagacagctcaactggggtataagccaaacgtcttctccttctggatcctttttcttcaactgaggttgattgattattgcaagaatgagcatatgacatactcaacaagccacacagcaaatatgcaagtgcacaaggataccaaaggatggcataatataggctcatttgcaaaagcagcatttagcaaaacatttaagagaagtaaaacagtggagtaattaatcagaaattttaatcaacactgaacaacacacccatgctgcacaggcccaaccatcccgaacaaccatacccggctgtacagatctaactccaaaccaggagctaagcaaattattaccaggtataacatctataattattgtgagaggtgtgagactaatcacgaaaaacattgctcaacccgcccataactgcgggcacggctattcgaatagttttactctggccagaggtgtactactgtacccacaagacacagcctcaacatcatgtctaccatgcgtcgcgatactggaaagtacccgaatagaggctgtgacaataccctctgcacaacacaactcaccacagtgcaccattcctggatcataatcacccccttataaaacaaggcatggactccccagcgacccccgtgggcttatctccaccacttctcagtctggtgctccgcaatgaaccatgctatacaaaaggtaaagccgttgcccacgctggcttgtggttggcacggttaaggtttcacaacagtagctcgcgaaccggtccttaattgccatgagcacgaccttcaaaaccatgtgctcacaacccaccattgtcaagttttagttatcaattaattatcataacacgattaaccatcgtgagctaccattaaatataataataatgtagtacatatgattcatcccattagtgagctaatgtttctaagcatggctaagcaattatatctaacatctagttgaaccaatatatataaagctcaactagtcaaattataatatcccaaggtatcaaggaatagagtaatcaatgcaaacaggccataacaaaggaataggttcacaccacccggtgacattcgaaaataaatgcacagttgaaataaatagagaatttaaatataggatcaacatgctcaaaggattgtgtttaggatctgtgtgacttgccttgcaataatcggtcttcaattaatcttcttgaatacttccggcgcactcgcgcaccttcgaaacgatggaaacgacaagctaacacgcaaaacaaggaaaaagactaataaaaaccaaataaacagtacatataaagtaaacaaacatgtagatcataattttagatgaattatgagacttgaacggcctcattctgacttcatatgaatttattacgaattttacaagattaaatctaattaaagcccatttaaaaaagaattaaataaatttatttctatttatggatatttttaatatgtagatctttattttacacaacttttgcaacttgaaccacattaaactgagttacaaagaattagttatgaattttcaaagattaaatcagattaaaacatttatatggattttaattgaattatgacgcaataatgaattatttttgaaaaggaaaagaggattattgtgtcagcgggtcgggttcacggtggaccgggtgcacaggaacggtctacggaacggacagtctagatcaaccctatccacaacgaacggccgagatcaacttgatctaccgcggttcacgggacaaggcgacgatgacgtcagcggtgacgtcagcgatgacgtcatcaccgacgacggctcagcctcgcgcgctcgccggcgaacgacggcgcgacgacgcaaacggaggacaccaacgggtagaggacaacacggcgaactcaccggtgaccaaaaccacggcggaagagcaacggacggcgccggcgatgaggaagaagcggcggcggtcttcgggtcgacggtgacggcggtgctccggcggtcttcggcggcggcgaagcgctggacggggacggcgacgacctcgcgatcccgatggtggcgacggcgaccgacgacggcggctgcaacggcggcgcagcgcggctgaaccgatggcaacgacagcgacggctagggctacgcggaggcggcgctagacgcgacggcgggctaaggcaaaggtggcggcggatagaggaggtcccggggatgcttttatagtggctaggaggcggcgacggaggcccacggcgaccggcggtgagaagaaaaggttagggttcggagagagagacgaatccgattcgagatcgaatccacgagtttccacacgaaattagccgacgattccataagagaaaagatagagtggatcgcggggatcatttcccctctatcgattcggccggagatggaaaggagcgacggaattggaaagcggcgacggctagggtttcggccggcagcggcggcgcgaggttgacgacgaccctgacaggtggggcccacctgtcagcggctgagagagaggaggaaggagcgcggtggactgggccgactgggccggggagggagagagaaagagagaggttttgggccggctttcggcccaaagccaaaagagacttttaaaaacctttttcaatttaaattattcatgaaatgatattccattgattaaaaatacttccttggctcaaataaatcccagaaaaatctaggaactatagaatcaagtaaagtatttaatgaaattttatctggccccattttatattggaatttattaattaaaaaaaaatagatcttctcttctaggcttttaagatcatttctaataattcccttttagacaacaatttataaattaaggatttttaaacaagaaaagcacttaacataattataattagatcattaattgattaactaatcactgaactgttctttgtatcatttaggaattgagctctgaaaaatccgagaaaatttcagagagtgtaattaatcatggataatttaataaaaattaaatccatccatgctttaaatttaggaaattttatttcccacatttaacttcacttgtaaattaatgaacatttaatataaattctaataataatttattaaataatttataaatcctgaaacaaaaatcaggatgtgacaacagtaatgtcgtttgggttaaccaacgccccggcatgctttatgaatctcatgaacaaagtgttcatggattacttggacaaatttgtagtagtattcatcgatgatattttaatttactccaaagatgaggaagaacatgcggaacacttgcgattggtactcgagaaacttcggaagcataaattatatgcaaagtttagcaaatgtgagttctggttaaaagaagtcgcttttctaggccacgtaatctcagccggtggagtagcagtggatcctgccaaagtggaggctgttacggaatagaaagcacccaaatctgtgactgaaattcggacttttctaggcttggccggatactaccgaaggtttattgaggggttctctaagatagcccgaccaatgacacaactactcaagaaggaaaagaaatttgtgtggtcaggacagtgtcaggaaagctttgagcagctcaaagaaaagctgaccttggcgcctattctagttcttcccgacatcaggaaaaactttgttatatattatgatgcatcaaggcaaggactaggaggagtactgatgcaggacggaaaggttgtggcctatgcgtcgcgacaattgcgaccacatgaggaaaactaccctacccatgacctagaactcgcagttgtggttcatgcactaaagatttggagacattatctgattggaaatcattgcgatatctacactgaccacaagagtctgaagtatatttttacccagtcagatctcaacttaaggcaaaggcgatggctggaattaatcaaggattatgacttagaggttcactatcaccccggcaaggcaaacgttgtggccgatgctttgagtcggaagagccattgcaatcatctgagaacggaagggatggcccctgagcttaaggaggaaatggcccagctaaacctacatatagtaccccacggacagataaacacactggacgttcaacctcttttgagaacccaaatagaagaagcccagaaggacaacgaggaaatccgagaagtgaaggaacgcttagctgcaggacgtgcaaaggaattttcaaccgatgaaaaaggtgttctatggtataaaaagaggatctatgtacccgaacaggggggactgagaggattaatcctaaaggaagctcacgaatcggcatattcattgcaccccggaagtaccaagatgtaccaggatctgaaggaaggatactggtggcccaatatgaagagatgtggccgaatacgtagcactctgtgacgtgtgccaaaaggtgaaggctgagcatcagcgaccggcaggtttgctgcaaccccttagaattcccgagtggaaatgggatgagataggtatggattttattgttggattgcccaagaccgcaacaggatatgattccatttgggtgatcgtggatcgactcaccaagacggcgagattcattcccgttaagacaaattatagcagtgccaagctcgccgagttatacatgaccaggatagtatgtcttcatggtgtacctaagagaattatatccgatcgaggcacacagtttacctcgcatttctgggagaaagtacatgaagccctaggaagttaccttgcgtttagcaccgcttatcacccacaaatagatggccagacagagagaacaaaccagctcttggaggacatgctgagagcttgtgctctggattttagcaaggattgggagatatgtttgccctacgccgaattctcctataacaacagctttcaagcaagcctaaaaatgccacccaatgaggcattgtttggtcgacgatgtcgaaccccgctaatgtggtccgagacaggtgaacgggcggtatttggacctgacattatcaacgaggccgaagaaaaggttcgtctgattcgagaccgtttaaaagtggcacaatcacggcagaagagttacgccgacacccgaagaagaaacctggaatttaaggaaggagattatgtttagctgaaggtttctccgatgagaggcacgaaaaggtttaaggtcaaaggaaaactagcgccaaggtatgtgggacctttccaaatcacggctagacggggagaagtcgcatatcagttacagctaccagagaatatcgctgatgtgcacccagtcttccatgtgtctcaattaaagaaatgcttactagtgccggaagaacaagctccgctggaagagattcacattagcaatgatctcacgtatccagaacacccgatccggatattggatgaagccgaaaagaggactaggagcaaagtgtggcgtgtgtacaaggtacaatggagtaatcacactgaggacgaagccacctgggaaagcgaagaattcctgaggacggaatacccgcatctattcgaaaactggtaagaaatctcgggacgagatttatttaaggggtaggtttgtaacaccctgaaaattcgaccgacaaaaatctaaactctaaaaatatgggccttcaaaaactttttaaataaattgcatcatgccgattttattcgcctatttcattggattttgattttggagtttgttgatcgcgaataaagaataattaattgggaataaaacctaaaattaactgagcaaaataaataactgaaatataatttaaaataaaggttgaggtggggatagaaatgaataaaatattaccgcgatcatatttgtattaattaaatctaaatacaacggaatgagaattaactctaattaaaatcaagtaaattatataaaaataaaatatgggtacaattaatctagagtggatccattggttgggataatacacatattgagtaaacttcatttatgcaacatttagaaattatagaatcaaatttatatgggaaataaactaaaattgggataaataggaaaatacactattcattatggcgcaggtgttcgatgcggaccctagccttccccctcctctcccacctctgcaccctagccggccttgagccccgcgatgccgccgcccgtcgcgtcgccgccccgcgccgtcgccgtcgccgtctgccgcgccgcgcgccgtcgcgtcgcctcgcgccccgcgcccctgccccgccgcgcgcccgtcctattgccgcgcgctgccgttccgtcgcctcgcgccccgcgccgctgccgcgccgcgttgccgtcacgtcgtccgtcccgtccccgcgcgccgtcgccatcaccaccccgcgccccgcgccgctgccacgccgtcatgtcgccacggccgtctgccactcgccgcgcgcgtcccgtcgccgcctcgcgccccgtgccgccactgccgcgccgtcgctgtcgccgttccgtcgccgcgtgcgcgtctcatcgccgcctcgcgccccgcgccgccgtcgcgtcacccccttcaccgccccctctctttctttccccctctcccctataaaaatcccaaccccttcccccttctccaccccactccattccctcctcctctccctctcccccttctccacgtgccgccgtcgtcgtgccgccgcgccgccgccttcgaagccgccgcgccgtgcgtcgccgccttgcgccaccgtcgtcgccgccgccccccccccccccccccctctgtgcgctctgtcgccgccgccgcctcgggtagggagagagcgagccgagagagagaggaagggagaagccgagggagagaaggaagaaagaaagaaggagagaaaccgggagggagagaaagagaaggaaaaaagaaaagaaaagagagaaagagaaagaaaaagaaaaagaaaagaaaagagagaaagagaaagagaggaaaatagaaaagaagaaaaggtgcaaatagaagagaaattaggggagagattaggaggatttaggaaataaaaatgatcggggttaatcatagattatttttggaaattcctagagtgtaatagtattttgatcgaaattctaggttaattatagaaatatgtttcttgatcagattagattaaaattggtagtaatttagatgtaattaataactaaacaacaattagatgaattcttatagattattatagattatttttggtaatctctataagtcatcgattcacggtagaaattcggatttaattactaggaattttagccgtgtattatatttaattgtttagtcatagactaaattaaatcgtacaatattatatattataagataattttaggattctgtccgatatttagctcgcgatagaaatttctacctattatatggatgtaataccagggcggattaaattaaaaacttgtgctaataaaataattatgccacaaaatagtttgaggatggatggagttaaacaaacggagtagctctatttcacgaacgaaaatagataatgtaagaaaccgacttccgcgcttgatatcttcttggatttacttggatctttatttgaattctaaccgaattcaaatcgtttcttcgcacgtaattatagagcccgagggagttgcggatccaagcgaaggacaagacccgcaagactttgagcaaggcaagtcatcactattccttgaacatgttgatcccaactgcgaaattattttgtttacaaataaaaattgcatgaaatgatgaacatcctacttgcgattatgccatgccttgattattgtttacccccttatttcttcgtaaccatgtttacgtatgggtccctagtcaattatgacaattgcttagaaatgctattttagaatcatgcatactcatatttataaaatgttatatgcttgggcaattacctttgagaaggtaattgagatacggcatgtggagacatgagcgccacattgccctgatgttgatgacataatttgtggaaggagaaataaaattaaacaactgttttcgactggggcggacagaggatttgggtggtatccggaaaaggctagcaccgtccccggtcaattaaggaccaagccatgaagttaagcatgaaacgacccccgtacaaccgcacttctcgtataggtatagacctagcggaatagatagctgagcagaggcagtatccatgcatagtggtttcttgatgtgtgaggcaggggctctacggtggggcagccattggtaggaccgcgaggcgggtgtctacagtggtgtcgccatcggtaagactgccatgtgagaatctaaacataattataacctaatgcatgtgagagtcttcctttcccgaatgcgccagaactcctctcactgctagaaaccgtgtacgcctagagtgcatgaggatgtaaagttcatggagcgggtactgccaatgcgaggttatcgaaaagctttgccgtgacgcgtctcatgtgttgggacgaggctcatgtgttgggcagtttcggagtgcgggtaaagtgtacatccactgcagtgtgagtaaatcaaatctattcgaatagccttgcgcgcggttattgagcatcgggacatgtattacacttggctagactctaaattcttaacttgtgtggaatgggatattgcatgatgatttctatgctgatggagccacttcctgagaggcgggaatgtggacgtcctcagaaaaccatgacgactcaatggcgggaagctatccttgggatcacaatggatggtggacagaaccgtcgttgtttaatgaaaacactggtactaaaatttgatcagtctgtgctaagtcttaggcttgtgaaaagaattacaaaacttgctttgcgcaaaagaaccatagccatcctttgaatacccctgtcatatgcattgttgctgtggtggcttgctgagtacggttggtactcacccttgcaatatacaaacttaatcagaggtcggagatgaagcttcggaggatccctatgcctattaccaggagggtgatgaagacaatggcgctcagtaggtcttagttacggccgttgcctgtggcaatggcgtgccgctgccttaactccgctgccttatctacttctgtttttaggatgtattccggaccactcggtccgatgatttaagtctatgcctgcgggcttatgatgtaatgattcgtactagacactcgtgtatgtgtacttggtatttcagctatgaattcgtgtgtaccagactacttgatccagggaaatggtactgtttacacgattgattcctattataaaaacgggggtccacattcacccagctccactcccagttttagtgaagctgaaactgtttagctgagctccagctccaggaggggtggagctggagctggagctatgccaaacaggcgctaagtagttggagctctaccaaacaagctctaggtatgctcctacgagattgctaattagactttttttctcccaccgctttcttcttttttgtttttgacacaccatatagtttttcttttcggggtaaatttatatacctaaagcttatacatctaaattttacacatctaaaattggttaaaagtttatgtggccgatacaaattcaaattcagatttaaatatttctacgtagaatatttctatacataaagtttatacgtatgaattttacagtatatatttataagtataaagtcaatgtacatatatatttttaagggtattaattttttttctaatttttattttttaatttgtttcttttaaaatttatggtgcaataggaagggaagaaggggagtagcgtgagtgttaggagagggatggggggcgatcacctgtccattagccctccccgtgctcttgagccttacgtggggagcatgcttcttctactgtgtggtagacccttttttaaaaagaaaaaacgagcccgggtttaatttgagcccgagttgcccctgatggtcgttcttcaaatgttcatttgactttgctaaagacaatataattcaaattaatgatctcttatacttgatactgctgaagaaaattcaaaaattaatgttcccttataaatttgatgtttaaattgtatgacttgataccacacatgattatttgtattatctttattttacaacccgttacaaattaagcacgagcatatgagtatcagaccactcatttgagatccttcttccctcaggcatgatgtatgtgcataacagatgtacaacgtataggatgttactgctgtaagttttgagaaatcactagtcgctagtcttcctgggacgagaagtagtccagcagcttggaggacagctccggccacacgcgagtcggacggtgctttctgttgaggcagatgatggtggccgtcgattccacaacgagctgccattgcatgcatcaaaaattaatgtagattaactaaacatacaccttttgttcttaaaaaaaccaacttctagtagtaaaactaggcgagttcagttcagagttatggaacggaggaagtatcaattatatatggaggtagcatcaagtatgtgattatgcatgttagacacgtgttgtactgaaaatgtaggcacacgaaaaaaactcaatgctggcttctcttttcgccaagaaaaacgtgcagagctatgggcctatggcagcagcactcagcatgcacgggcggcatttgcttgtgtgggcactgctggttaccttgcgatccggcagcctctcgatgtattgttcggcataaatccgtgctcccttgatccgtccaagtgacaacctaacaacaaacttctcgcctcgctgcgaattgaacaatgttgcaataaattagaagacatggtaaaacattggggttaattaattagccatctccagagactttggttctaataattaaaaatggtagttaacaagaagaacgcatatgtttataccgtgattagggatggtaattttatccacggatccagtatccaacccgatgaacacgggtgtgggtatgattttttaccatgggcacgcctggccaagacccggagacgttgtggacaacaaccgggtttatttttttacccatgggtaacccatgcccaatcgatacatatgtattagctaatttcgacttatctcttaattcttataccttttttttcttagtctattttgtgatcctaactgataataacttgggatgtaatttaaattattgttgataactcataatttgataaattattgattttgtttctctttgttaaattatttatctttcgagttattattcatatgagatccattgggtattcattgggcatgcctgtacacattgggcataggtatgggcacagagttttgcctgataaccctagagggtagggtttaggcaagcgatatcgggcatcaggtcagacatggtttttctcaattatatccgtgcccaacccaatccattgccatccctaaccgtgatatttaattgtttatacctttagaggggtgaagtacttaatgttgagctcggtgagtgccatcgcgttgcctgtgcacgctatcgaggttctgctcattccaaggcctgatatcaactcctctcgtgctgcacatgcacgtaagtgatttaattattagagtgattgttaattcattcatgggtacgttcatgggtgcaacaactgatcaacctcgttcgatgtaagaaggatagacggtgttgttgacaacgccgtactggtccagatcgcagtcctggacggtcatctccaactcgaagaactttcgcgccctgaattgcacatcaaaatacaagttagagaaattaaaaagatcatcaagttaattcaaggccagatacatggttcattttaagagatttaattaacgactgagtagaatagaaaccaaatgttgaacaagaagctaagaaaaccacaaaactttaaatcttgatgcctacaaatattacacacataatgcactcttctataagaatttagtgagcttgatatttgtcactggcatgcatctctgtcattttagctagagtctaccaagaaggcgcatttgcgtatgtcatgtgtatagtacgtaatacgtatgagcatatacatctttcatgtaaatcgaagaaagaaaatgtattgagcagagagaggaggcaaaatgaatatatatttagtttggatgaaccttggtttggcgtcctggtaggtgttgttggcggagataacagcttcatgggaaaggaggttcggggcggctatagcttcttcaagggaacggagggtcgggccggtggcaggtatagcttcaagggaacggaggttcgtggcggcgtagagagcccctgcacggcggccatccgagtggtcgacgtgcagcagcacgccgaggtggccatggctacggcgtgacgacccagctgctgatccggcgtgctgcgggtggcagctggtgtttggggcgaggctaacgcttggctgctgcatggtgaaccaacaaccggtacgcgtgcttgatcgatctaagctggagtagctagcgccgcctgtgaggccgtgaaccgtgtgttgatcgatcgatcaatcgatcgttctatacgcgactacactacgccttgtgtgtgctactcgactgctacgcctgtgtgtgtgtgagccgtgtgcttttgatcgatctccggcttcgaaccgtcgtctatttatagctgctttcctaacacaactgtcatatcacacatcatatcaattcgtatcgtatcatacagcgtatcatattcacacttcctccgatcctgcttaaagaattcctggtgtttctaccgtcaccgatcgatgcgaacgtctccgccaccacttccaattaattcgtcggttcctgtacatcgatccgaatgatctgttaccagtacacgtgctgatcatacggtttcacggccccattgtttgttgcaaacgagaaataatttgtgaataaaatttttatatacgtgttcttagcgatctaaaatcaaaagctgaaaaataaacttcgatgaaaaaccttaaaattagcttcaagaaaatttaaattttaactaataagcataagtataagcgaaaaaatgaggcttcaatttttcacatgcatgaatgcaagcgggtcgacgcactaatctacttatatattaattatctttcccaaattgaccatcatataaatttatacaccaagaacaaggataatttaaatcacattaatcaagacaccatacacacattctctcaccatgcccacctgcacacattctcgcatgctgcattaattgtattatgatgaaatcagtgtctatgtggttatatgatgatcaatttgagaaattttaaattccattacatggtgatcaatttgggaaggagagagtaaataaagtgtaatccgcgggttttcacgttatagctcggcttgccgcgtcatagagatgcgagtggatcaacccataaacccattcataggtcaaattagtaggtaacccgtaagcttgcatcccacttgatagtgcagtagtaagaaatatatatgtggtttcaactctaagatcccgtgttcaataatccctccgtactcgtaaaggaagttgttttggacagcgacacagtctccaaacacaactttgacttcttatttctataaaaatattcattgaaaaatgatacatgtatacttttatgaaagtatttttaagacaaatctattcatataatttttacattttcaaacttagcaacttgatagttattcatgatttatattcctaagttttgacttaaacattatcctaaacgacttcctttacgagtttggagggagtactcaacacactcacaattatttcttaatccaaatctcgtttttttttctcaacttccaagggtccgcatatgcacgcacatgtacaaggaagatcagaatatatatttgatagtatctttcgggggggaggggggaagagtgtacgcagatgcacgcacgtacaaggaagacaagaatatatatttgatagtatctttcaggggggaaaatgatatactatctgtttgagaggtggagagaccaagagaaaaactagtagatcaaaagaaatcaagcttaacgtgtcaaggcttcagggagaagaaagtcatgtaaccggttcacaatccccaccgaatatgaagccagtcttgcatacaccacttcttccgtggccatctttaaaaaaaaaaatcgcggcccttaattatgtcgattcttctactctgaatagaataaatgcagtaacaattacatgacacttgggtaacaattaaaaaactcatttacaattatgctgattccaggtcaatcttcaaccccggatgtcgcaatattaatttcaagtcttctttcaaaatttgggggcataggatagcaacagcaacaattgaattctttttttaaacaacccgtacaagatagtgcgatatttctattgatatagtataaaaaatagtaataagtctataattctaggagactatagtcaggaaaaaaataacaaccgcaccatgcgtctacgactgatcctactgccaaaatagaacaagcacaccacacctctaaggaatgggtcttctgaactacgactctaagaaggaaacaacgctaagggtggtgccgtcactcgtcctagagaaccaggacgtgattttcacctgaaaaaaccattgtggcataagagaaaacgcaacaacgccctaatgggaaagcggcgcccataggcgtctccgttgtcggcctgaaggctaggccttcatccgtagctcctacactcaagcgccaatgggtgcatatccaattcagcagaaaccaccagctaatcccctgcaacgtgcagccaccgcgtcgacgcctcgccactgtccgaccatcaaagtaggatctcaacctccggcgcgctccgattccatccacttggttgagttggagagggataaggtgagagagaagaatggatcccctcacctccatccagcgtggccatcttgcagaggcaagtcgccgccacaaaaggattgacgcctggaaaggagcttgccgcagccttcaatgcccacctcatcacgctaccttcgtcaccacctcgagtaggctggtcgtgttcgaacatgccacctggtcgtatcgtcgtcgcctccatcctcccaccgcgacagtctccccgccgttgcaccccagtcgtgtcatgctcccaccatggcaagttcgccggcacactgttttagcctccatgtcgtgctcgctggtctcccaccgtcgatgtctctcgcgcctgctgccgctcgccacgactcgtccctcccgtcagctgttgtcgtcgcccgcgtcggccctctatcgtcaatcgtgctagccagctgctgctgtggcctgcgcctcccatcggccagccggtatgctaccgctcgaacctcccaccggccgcagcgtcctctcaacctcccgccatcccaccgctgtcactcgcgcggacgcctgcacctccaatcaaatcccgcggccaacaccagatctagtgggggagacaaatacgacgatggcggatccgcagcttcacgctacaccgtcacacagccttcccagcacgtcgtgccgcctcctcatgccgagggcgggctgcagctggggttttggctccgccgtcactatcccggcagccgtgtagatttcggcgacagcgaggcggggagaggaggggagggtggtggctgcagggagtagggccgtcaaaaaagctcgaggctcgcgagcagctcgagcttggctcgtcctaggctcgattcgagctcggctcgagctccaaacgagccgaactcgagcctgagcaaaagctcgcgagctttaccgagccgagctcgagcttctaccgagcctggccgagcttgactgcgtatagtttatattgcatgttcaccttattaatataataaactaatagataaatatatatattactatctatttacaaaataaattagcatgtgttagcacaatatatttattttaatcattttatactcttttattagtgtgatcaacaagaaaataattatacttatcaagagattatcattaaaatatatattatactacttatggccaagctcagcaccaagctcgagctcaaacgagctcaaaccgagcttgcctaaaagctcgaaagtgcaataggctcggctcgagcttgtgtcgagctcgagcttgggcaaacgagctcgctcgagctcggctcgttgacagccctagcagagagctaggattcacccccggtcgcccaggcgtggacgacacgggagcgcgagtggtcgcgggtaaacttttatcgtgaagcatccaacaactgaaatttgatcattgctccaatttggttgtttcattttatggtcttgctccgttcagcttcttgtaaaactgaatctttttttttcccacagagtgcgtaggtgaaaaaaggtgagggcgactttagctctgattcaaccaggcttagcctttccgatcccaaattcccacaacctatatggtacgacgttaattttgatcaaattctgatcatttttttgtaaaatttactgttttaaatttggatcctcgaaaaccattggacatttcagtcgaaatctgcttttgtcatgtacaaaatctcaaaatttcgtaaaagaacgtgaatctttttttttctgaatgaatcgatgagaccgccaatttcattgaatagagaagaaaggaactgtacaaaagaaaactttacaaaagcaaaaaaaacaggagtgcagccctgccgaaaaggctaattacagcggcagccaggcaacgaggcttctcgtacccgcaaggctccacgttgttcttcctcttttatcttggatagaagatttgacgccggcaactccttgtactggaaagtcctccagtttctttcgttccaaatctctcaggccactagcaaagttaacgtgcgtagtgccttctttggtgcttctcttgtacttgcaatggcctcccaccactcgtataccgtaggcgttgctcgccagcgatgagggcttaggtgtccattgccagtccaatgcgctatctcattccaaattctctgagtgtataacgtgcgtagtgccttctttggtgcttctcttgtacttgcaatggcctcccaccactcgtgtaccgtaggcgttgctcgccagcgatgagggcttaggtgtccattgccagttcaatgcgctatctcattccaaattctctgagtgatgagccgtctcttgggtctgacgacatagcggacacgtggatccgtttggccagcctctggttgctaatatatccaaagtccacactctgttttggagaatcaaccaggcaaaggttttgcatttgcgtggcgcccaagaacgtgaatcctagattcaatatattgtgactttgtgttgattttcctactggaatgtagaatatgcatctgacctgcaggttaaagcctgccattttcaattgccaaaatcctaatggtactaagtgcgacatcgagggtgaatgggtgtgatgctctaggattggattccatgcacctttcagcatcaatataggcctggtttagttaaaaaaaaacatcacatcgaatctttaaatatatgtatgaattattaaatatagattaaaaaaaactaattacatagttagaggggaaatcacaagacgaatcttttgagcctaattagtccatgattagttataagtgctacagtaactcacatatgctaatgacagattaattaggctcaaaagattgtctcgtggtttccaggcgagttatgaaattagttttttcatttgtgtccgaaaaccccttctgacatccggtcaaatatccaatatgacacctaaaaattttcttttcgcaaactaaacaggccctatagcgcacagataatcattgatggacgatgggaccatacatcaccattccaaaaaaaggacattgttcaaacacattcaaaaacatatgaaaggaaagcggaacaacgtgacatggtgagcgtcacattacgtccttgtgatttgcattgcactgtgcatgcagcatgcttcacaaattcagcaatatccttttcttgttaagagttgcctccgacataacttgtgcattcaagattgcacattgcacacctcgcacaaggcaaacggatatatttttcttccctttcacagtacatcaattcgaacaaatgtatctttcgctaaagaataagaaaacattgagttcatatgtatctgtgaagctttacaattgatccatatgaaagtaactttagggaaagggtagagataaggtagctacttcataatccataacggaatgttttactcatcacattacacagcaatttggtgctgattcaagcatctccggagacctgtgttttatagaaacgcagattagtcagaccttcaatatcaaaatcaaatgcatctatagtagtagcttactccctccgtcccaaaaaaactcaacctagacaaggatgtggcatctcctagtacaatgaatctgaacagctctagaaaatgtcacatccccttctaggattagtttttttttttcagatggagttcttaaggtaataagaaacataaataatatactgataaataactaatttaacataatggacaatccaggaacatgtcatgataacgtaatcactttgcagatgattatttaatctgaggggagaatcttctcatccaaagatccttaggtatttttgcaaagtaaatgccatgtactacagaattagttcatattacaatcaaagaaggtcctaatagcacctcaactaaattaagaatagcaaaatattatatggagaaggtaaaagttaaagctgctaaaaagtgagcgtatttaaattcacaaaatgacacgatatggacagtacaatatattttgagttagaatctgcatgattggcccttttgaatcaaaggaattatgaaggaatttcataggattgaaatcctatatgaaattttcctatgtagccctttgattcaaaggattgaagttttccaaatcctacaaaattcctatggaatggcttgttgcatataggttttggaggaaacttagcaagaggtccaacctcttggtaaaaatcctttgagtctatctctctcatctgattcctgtgtttttcctgtggtccaatcaaacgatcattcatgtgtttttcctgtgttttataatcctctgttttacacttacattcctgtcaaaatcctatgtttttcctattcctccgttttttcattcctacgattcaaaggggccctaatgttaatgcaattcgaaactgaaataaagaacttttgagagggacaaagaaactatgatgcgtgactctgcctaagtacagcaatacttaatactcacaaccattttctacaaaagtccgccatgatcttcattaataaagtttgaccattagacagttgtacatattacaatatgttagttagaactttataatcatgatagaatattaacagtataaatcaaaaaccaacatatcagtaaagcaattgccaggcaaagtttgatccagaaatgcatgctagaccaaatattttgaaacaatttagcatcctacggaaccaacagggtataaactttcagttcagttgaatgtgtgagtgcaaacagtaatgactaacaacagttacacttaaaagaaaaggtttgtaagactcacagttgtcccaacttgctcagatcaagatctggagcaatgtcttgaacaagatcactggggggttgaccacattcttgcatgttttgcatgatctcaaaaatctttgccatgttttccggctccttttcgtagacctcattaagcttcatcatgagttcaagctggttgttgtaacgctcatattcttctttgcttattttgcttttattttcctcgagccattttgggtatttttccacaatgtccttcatcggctcatgaagaatctccttggatagaagttgttgcatcattgtttcaacaatggagtccatatcctgtagaaggtaaaacaatataaagcgcttggttcatagctgtataaatgcaacatgaattaactaaggtctagcatcaactgttaatataacaacttataataggaacacacaagtggcatattttttgagggaatacagaaaaggcttgcatatctttgtattaagatagaaaagctcaaccaacaacagacttgttttgagaagcaggctaccccttgagctattatggccttatgggttactcacataaccaattttgtaacctaatatggaacatacaagaagtggcatatcccatggtccagtcatctcatatagaacttatcttagtaaaaacaaccactatcctgcatcattttcacctagatgaaataacagcttgcaaagtaaattgccagaggctggttgtgtaattttccagggaagttataatcaggtgagcaggagtgcttttgcaccctgaaaggccatgcctagaaaagaactacatacagatgggaagttacaagcatataatcttatcagttgtgctgccttcaaaacttcttagtgatagccagtcagtcgtacatgatgacatgatgactgtctacaattgcattgcacaattgaagacatggcaaaatggcatataggattggggctatcttgcagaaaatcacatgtatctgttagattcatgagtatacacaccaaagtcctttcgtccagattatttcaattgttagttttgttcatcattgctgttttcatatcactgccgttcaaataagatcccttctattccgcagccaatttcacatactttctcaatcaaagtactaccatagagaaatcttactttctcaatcaaagtactaccatagagaaatctaaagctcatctatatataccagtgggcataagggtcatccatcgatttcagaatgcaaaatttgtatttacagcacagtttaaacagcccacgctcaatcagtccctaaattctcataccgtttctaagttccatcgaccagatgacattccaaaaaagcatacctgcgcgccggcgaactcctcgaactgcttaacgaactcctccatcatcgcatcgtcatccagccccgctatggccccggtggccgtctcgagcccgcgcaccgcctcccgcgtctcgcgcgtcagcttctcgagcgcctccgacgcgtacgcgcccctcggcggcagcggcggcggcgcggcagtgggctgcttcgccgcccgccgcctcggcgccctggggtccggcagccccagccccagccccagccccttcaccggcttcgcgtcccccgaccccgatgacgacgacgacgccgccgaggcctccccgccgctgcacgcacgcacacacacagagatgtcatcagcgtcacggattcgatcggaattccagcggtaggctctgaccggggggggggggggggggggctaccttttgggggcggcggagaggtcgaggctggtgaagtcgtcgagggcgctgtcgaggagctcgtcgaggagctcgtcgccggcgccggggttggaggaggccatcgggaggagggggggcggaagccgcggcgtggtgggggaggagtggtcgccgggtcgtgcgagtaatcgggggcgcgtcttgggggggggggggggggggatcgtcgaggacaccacgacagaaaggaagcgaagcgccgatcccttctctgcttcgcaaggcttttgctgtttagtttggctttttgcttgcagccttgcagttgcagggctttgagcctgtgccaagggcaaattaactctgaagtttgtttcgtagacgtagttttgagcctttgccaagggcaaaaccgatcgttatattagttcgatccactctctaaagtttgtttcgtagacgtagttttgagttttttccctcatgttagcaaccataaggaactctactgtggcaggtctctaagtgtagagaggaaagacgttgtcccaaatagtttattatacgagatttgctccgatccaataaaaaatatctcgaaattttccaatcgttagatctaactaggtaggatgagcattgtttcaataacatcggaaacgatttggtaccgtgaagtaccagtacctcgagatattttttgttagaccggagcaaatgtcttattattatttttttgccgggccagccaagataggccaaccaaatttacttatgattgaagaatatatacaaatatacaaagttataacttcaacaagaagctgtcgaagtaatggaagttgtcaccggagcaacctcccaaaagcttgattacactaaggactactcctactctcctatattcctgaaaaccccagcttccttccaaatcgccacttcctttttgattgaaccaaacagaaaactggctgagcgccgctggttctgaaacacacgcgcatttctttccttccaaaccatccaacaaacaagtagcacaaggctgtcaacaaatctcttattacacatatgaagtttctgtgtaggaacttttgaatctgaatcggaatttgatccaaatcgagatggggcacgtaaactttcagcatacaaacttttcaaataaggagtgaggtgttcgtgcgagttcgtcgaacattcgcgaataaacttagtacgtacgttcacgaattaaccttttaacttactagaccgtaattgtattaaatttaggatgagtcacatctcatttttaggttacgttattttcggatgaaggaagaatatatattgaatagacgagtgatatatactatgtaaaaggttcacagtagggagaatattacacgaaaaatgaaggttttaatttcgttcatcagcatggatactaagaagagggccttcttgcttacaacttacaatggcaagagaccggatcaaccatcactgattaatttttctcagcggtggagaacatgaacaatacaataacatcgatcaataagaatgaattggaaccacatatctagagagttattacatctatctacagcgtccaatgcttcaaaattgtcgcctcggaaactacagttatttctgccggagtagtattagtaaaacctgctcagactgtcttctttttttcacactgagtgcttcttccatctcaccaagaaattgaggaactccatcacctgtacgataagcaaacagttaatgatgaacacgtcgaatgaaaatcacccaaggaagaagaaagatattcttttgagcttacttcagatggatctctcagcgagtagaaggcttcagtttccttgggaacctgtgaaactagtattccataaccgcaatttcgctgtcgaagtacctggttaaaccaaatgaccgctatatcagtttacactgaatcaaagatgcgactaggatatacagcactacgtgttctccagaaaatatatgaaccttgaaagcgtcttcgtcagttctgtcgtctccaatgtagatggggatcacattttcagagtcatttagcccgagtgactggagcagaaactccacagcctttcccttgtcccagtcgatcaccggacgaacctctaaaacctgaagatatatttccagaatattcagcacagggtttgatagatgtgcaaattaccaggaaatgggtaagtttcagtgtacagctaaatagacttggcatagcgttcttaccattcgtccattggttactttgagacgaggaaaagcctccagcacttcgtttacgagccgtgcgaccagtttccaatcctgcaaacaagaagcaatattgtcagatgaattttcattttccaagcgcttgggagcagagaaaaaagtatgacggaaaaaaaaacagtttttaccttctctgcaacgttgcgataatgtacagaaacgcagaatttgttgttctcaacagttgcaccttcaattccactgacaacttgcaagagggacttggtaacctgttgaaataaaaagtttgttaacaaatagcacaaaacttttgcacacccatcaggactaatcacagtaatttatatgaataataatgagatgatggaatcgttttatatttgcgttaaactggatagagcaatacaacttttttacttcaaagttgaaagagaaatgcacctcatcgatcattggcagaaagtcgtgtgcaggttggaagagattggcctgtttgctctgtagttggaattaagccatagtcagtattttacactagaacatatttgttagaatgcccccaaaaaaggtagactttttcactctatttgtagaaacataggcaagaaatcctcaccttttcagcactgtgctcatgatttgctgaaggtgccattatgtccataccatggcttccagcataataaagctccttcagttttacaaattcaaacacctgcatagagataagtaagccatatgtaagataagacatacacttgcatatgcaatcacttggcttctaatactagtacactaaaatgcatgcaaccatattttcggtaccttattgcgggaccttccgctgacaattgcagtggggaagtacttcgcaacatttctcacagcagctctcatctgaggaaaagtttttaatttaattcaaagcagctcttcattaaccaagaaatgctagttattggtcagagtttatattcagacttaccacgggagacatcactgctttgtcaggatcatccacaataggcgacagtgtgccgtcatagtctagaaacacagcaatcttcttcccttgtgcactggctacaatttgcttgaaggaagccaaagcagaaggacattttgcctgcaacacaagtcatcacatatgtcagtactgtccacgaaaagaaaaggattgcgagttactagtacaacttattaggccaacagaaacacaaccaatgtaaccattgtagcttaccatccaagcgctgtaagcagggtcttcttcttcagatgaattgtcctcgccaaatgctacattcagcctcctgcgaggtgacgaggatttcatggcatcaagcagtccattgacaaggacttcctcgattttgagcctactgacaccaacgttcatgccagagctggagtagccaccgggcatgactgaaaactgcatcagatttgaaggcaggccgcccaacaactgctggctgatcgccaccggatcggtgatgacaggtgagctattgctcaaatccatttgggaaaatttaggatgatgagatcaagaaagaagtatgatcgatcgctttaaggacgagtgcactgctgaatttagccaactgtcttgtcgatgaaaaaccacttcttcagtgtcttcttgtcactgcaggtgtggaggcagttcatcaacagagaaatacctgagaactgatcagacaatgtaagacaaagtattagagaaactgctcttgttttccatgagatgaaaatagtagtaacagttttaggatgtgccgtaccttgtcatgttcagaacgagtacacatctatatcagagatgtggattgcttcataggaaaagccataaaacgccagctccgttgcacttcaaatgttcagaaagttttactgcataaatcaagaaggaaaaatcttttcatttacacagaagtaaaacgacagccatgtcctcctcaagtgtcaggccgtaataaatgtgtgtccttgtcattcatgagcaaaggaacaaatcaacatcaacaaaagggaaaatactacaagatgccaaggaaagaaaaaaaatgggcccaggattaagtgtggcatcaactgtggtttagcagtacaatgtcactctgagtcgaataaaaaagaataaaatatctgccggaggaaaaggatgatcattaacacagttaggctcaatgtcttgatatctactacaacgatatgctggactaatcactgaggccatgtgtgcttgggcccatgggttaatgtcttaatgagtgtttctgaactcaaagaaatggtaggtaaacctaacgcgtcaaagttcagaacgcaattaaccatgggcaccaaccttaaaagagcaaccactagtacatcgctattagccatgatggaagcacaataacgtcagcttatatattctactaaactgtgtgatggaagcatataacgtaaggttagagatttttattgtgaaaaaaaaatcaagttggaaatctttaggagaattgacttgaagaagaatagacttgaaaaaattgttttggtcatcgaacatgttttcaaatacgaactttgagtggaaattgacccggtcagaaaataagaaaactgggtgtctaaaagaaaatgtcaatggatatgctgaacattaacaaccctagggagatgaaacaagaaaaaatcaagaaaaaggtaaggaaataagtggatccgatagcagttttagctagctctagcaaattgtggccatgtttacagttctcaagcaattctcagaacgagtgcattttttggctgttttcacacttttcgaggacctacatgaactccaacaatcacagcatcctttacaacagaaaagtatccgttttctcagtgagaaaggcaccgaagttcagttttggcacttcggtgcctatatttttgcagaaacaaagacatcaaaagagcatgcagtaagttcaaagaacaaatgttggaccaactgagcattgcatgcagaaatgcagaagtataagcaggtgatctagaagaatgacaaagagaagaagacgcacaccttaatgaaagacttgaaacgaactgcaagagagatgtgttggaaaatacgcagatggaggaagatggagtgctgaggagaggaggaggagaatggctttgatgccaaggctatatatagagacgggaggaggaaaagggttgaaagaaatcttggagaattcaatggcgcctacttgtgttgttacggggatatttgttaggtaccctcgttgtagtccacacgattttgcacagggttgatgccgaacccttttcacgcagctgaactcctttagagaacaaattagcggcatgaataattatatctccatctgtttataatcatattggttagtacttagtaagagagatatacaaaataaattatattaagaaaaaacttgcacatgcactattttattttctttattttatcgggtaagtgattcatgatttgttggtgtaccttcttaataatacttaaactgtaatagcgtcaatctacgagtcacgcttttgttctcttcaaaatttgtcacattattttcatgttaatgtgaatcaaactgcaaacaggtgtatgcccacgtcttttgtgtgcagctcaccgttcatacctgtcatagttagtcatatttttaaccatcgtagaatgtcaataagttaaaaatagagtaaattttataaaaccttacgtcttatagtcaaaattgcatatatgatttgtggcacataaccacatattttatgatctaaatatttcataaaaccccgtcttaattcaaatttcaattgattccagcatatctgaaataatatttttttttaagtggtgaagagttaaactaacaaatttaatcaagaaatcaacaactaaaagtttcatatacattgtgtgttttaaatttttttggtaaatatttgccaaatatgttatttaggggtggtgttttgtaaaacttaaaaaccacaatagatggggttctgtgccaccaattttatacaactttgaccataaaacataggtttactaaatttgctcataaaaaatatgcagatagccaacaagcacatatgtatttgtaccccaattatttaaccagtcatctgtagcaatccctaccgagaaaagatatgtaggcaaataaaaccattatactctttcgaaaacatcatccagtatataataatagagaaaccaggaaaccaaatgtaagagctactccctttgtcccactcaataagacgtggccaaatttgacactatcgtcaaaaataatctttgattttaaatttctcataaagcaaccaaatcataatcatataaaagtaaattaaaatattaatataatgatattgttttcataaaataaaatttattttataataaaataattatttatcaaacatttaaagtgttgaatctaaatatacatgcgtgccttatttagtgggacggagggagtacgtggtgtgtgcacggagcattttacctggccaaagccagtagcgaacccccgcactggttccttccacccaccgggaccgacgacgcgtaggggtagcccaccctcccactgacaagcacggtcacggaatccacgtcacgctcggcgcggccgcgtctttgtcagcgtggagctggagtcttgtcagcgtcgacgcgtcgggcccccccccccccccacccgtcgcccgcaccgcgccctgacgcccccctcccctgctggtccgtccaggtccgtccaccccgcacgccgccgctacgaaacagccctcctccctcctcgccgccgaccccgtccacggttactgacctccccaaccccccacccgcttttctcccggacagcgacgtactcggcccaacccccgctcgcgccgtccgcgtccgcgtcccgtcccgcgccgagccgactgtgagttgagtcagctaagctacatccagtgcgttcgctttagcgctttattactacttgtaccactactagtagtgctagtgtgctatactgccctgctggtagcctggtacccagcgcccaccttcgctgagcgttcgacgccgagtgagtactgagtgcgtccagcccgtcgccgtccgtcgtcatcgccgcgaaaagcgcccgcccgcggtgcagccatcgcccatcataaaaatacagtgtggttgtctcccgcacgtgccggaacgcaacttggagctctttctttcttttttcccgcctcctgagagaacacaactttgcagatatgcagtactagtaatcagttgatggttgccgcgtagatacagagagggtgaacttgacggcgaaggaaaacgaacaaaaatattttttttcttgtaacttgtgtgtgctcgagcatctgccctgtagccccttgacgaccggaagagccaacgcgagagctttcgtagagtaccgtcttttttatcgatgaaagaaaccgccgcagatacgttcacggacattacagcgattcgcgatgtttggtgtccgcaaccgaaacgaagaggatgagataaacaaatgtttgaaggcaatcttgcgcaactgaacctataaacaagccattgaacagaataaccagtgggcatgcatgctgctgcaccctgatacaataatgcatctcctagaaaccaaaaaagaatcatatacagctagaaatcagctcgccgtatcttggaggtgaactgaatccaaggccaagtcaaggagaaacaaaaaatgtgataattccccccaagggccaatttcgaccacaaagatttgataatattctgactgaaacagacctccatttttagagcataaaaagatttagatgatatattctgactgaaacaggcctccatctctttgtcatgaaaattctgcttcataactgcatacaaatagaatacaacacacaggtcggtggctagcctacttcacgacgatgttaacacaagtccttgttaacaaacgtgcaacttcaatcatccatcaaattttctttttcaccatccaacactaaagatatggtatagcgtcattttttttaagaggggttaatactgaaacgtcagtgctggcgacctgatgccttgggggaaaattgttggccaagtcggatccacgagggtaccagatgactcctggatgtctcaacgttttcgagtcgcctgcgaccacctaacgcccagctagcaactgccaaaagacaatcgaagacgaacatgactacatgagcataaaaaaaaactggggcaactgaacgagcatgagcataaaataatatagagaagaacatgaacatgtggaatcggccaatgggcgtgcactgtatctgcatctgtaattgactatacctaattgggaaaagaataccatgcacttcctcttgttggattggtctcctcgctgcctcgacagttgctaggtgcgctagctcatctcgtgcttcccaaagatgcctacaagaacaacaggcacatgaggtcactggtcagtaagcagccaatagggtcttgaattctgatttacacagcattctaaatgtactgatgctccagttacatgtcacttgtcagcaagtagccagtacgatcttgaactctgatttacacagcgttctaaatgtaatgatgcttctgttacatgtactaataatgaacaagacaggtcaactacgaagtggcaaaaaaaaaagagagccaatagaacaatttatacttttgtagtattgcagtcaaatttactcacagttttgtgcatacttctaacaatttgaaagtgcaaggaagtaagttactttggatctgattggccagcaatcaatcctgtaacagcaaagtaaacttatttagaactacatgcctgtccttggatccacagggaattcggataactatggagactggatgattaaagaactgcaagccagcaaacaatgctcatctcatcgttttggttttccttatcactataataaacaaaccccactcgtcactttccaaacaaaccagcaagagaagcagcagcaactttgcaatataccggggaagattatggatccacaggttagtctgtatgacaaaaatagttcaactaggcagatgaacaaaactaaaaaacaaaaactcaatttgcagttcatcccttctcactttgaccaaaatgagcatgaccatattattgatgcactttaatgatctgagattgcataaagttccaagatatttgcaaagttgcagaaagtaatgttagaaattagcttttttgtgattaatggaaattctacaggaatgcaagggcagtaagataccgtaagcaccatctagttatgttaggccatagtggtaaaatctaaaaagtggatgtttttacccccccccccccacccccacaaaaaaaaaaggaaagaagaagaagtttataagattggcatgctgatcaagaaaaagagatattaaagaaataaagtcaagtggttatctgatgaatgtaaaggaacaaataggactgtcttatgcattcatgtgaaccaacaagagaaaaaaaaaccttgaggctaaagcaatgtagactcatcaacacaactttgttttctcccctgaggttaaagcagaagaaaacgatatggactcaacagcacaacttctgtgagatctgttatagtcatcagtcatcaagtgcaagtgtgcaactgccagactggaagcaacaagaaccctagaagccatgaatgcatcattcctcaaaagggccattcaacgcagtggatctactatgtgcacatttggatctttggatgcatttctggagaccatcacctaacccaacagtgccattctcacatggaagcattgtgaagatactgttctttaggaccatgatgagttaacaatgagaactaatagaagatctgctatttacttagtatatatactgtaggtcgtaagttaagcttctcatggactggaccaccagaatagatactttttttattgtttagatggctaggaaatcatgatactttggaccataaagttatagacttctgttccaactagtgtgtgctataagctacacctgattaagattcctcagaaatttccagaataaaaaggaaaatttgcaagcaacagtgagtacatgaggttaagaagttatttttttcaaaagtagaccagagccaagagatccgagaagcattgaagaatcagagagtatgcatctaatatacatctcacaactattgccatctgttgatattacaaacacaagaattatctttggttcacttaatgcacaatagcatgcaggtcggctgagctttcatgaaacaacatttgaacattcaagatctgaagaaacaaagttaaagtgctgaatcaatgcaaggtagattgcctatctagtacttcctccgtttcataatgtaagtcattctagcattgcccatattcatatagatgttaatgaatctaggcacacatatatgtctagattcattaacatcaatatgaatgtggaaaatgctagaatgacttacattgtgaaacggagggagtagatgctaatcgctgctgcctccaaaataggtgccacccttggctcctcttaaccacccccatgggccactagagccaaccgtggtgctaccactacaggaaatgcagtgttattgtgaccactgattctgacattgccatcccatgggaacatcgccaaagccagccatggcgtagctgtacccatgaaatggcagctcaaggacaagatgcttaccaagagggggagaagctgctgtttaccaattccagcatgggtccatgtggttaattggttattgcagtgatgcaacttcagtgcacatactacatacaagaacacggctagtatttcttagctaccaagttatcgtcagtattaggttcttgtacagatggagtgcagtaaactctatcttggttaactagaatagattgagttgtgggggggccaaacctctatacaaaattgcaatagtctgcaccctcccacattgacccaccctgtggagatgcctccatggcaccatagccccatttgggtcacaggacacatcgactaggctgaatggcacttatcccaaccacgctaatcacaagtcaaaagtcaaaaccccttgcttgatttctaagtttaaaggcaatgttggccctttcagaacggaacagtgttctaaacagagtaacagtcaacacaaatgcgtcgcttcaccaatctcgacagaattcaagtaaattactctcgtcagcaaattatatataccaatttttcaaatcgcaatatggaattgtacttatgaaaaaggcttgccttgagatatataatatacatatatctattacttttggtggtgcctgcaaaaagtaagagaagactttactttttcctagcccccacaggccaaacttcacacaagaaaaatatgataatcgaatacccttattatggattttttttcatcgctctagacaataggaataacgtcttttagaggcattaaaaatatatagaacaaactatttttataaaaaaaatcattgcaacgcacgggcattatgctagtgtagtcaaattttactaatcatggaagcactaagtgactgattctggctagtaaaattaggacccacccccccccccccaaaaaaaaaaaaggagggtggggtggggagtatgggtttggcaaacagtgttgactaactgataattcgcatttctgtgacacaactactagacagtaaaacatccaaaatgcatgttagggcataagccattagagactagaggcataaatatgtattctaaatcccaagaaaactccagagacattgaaaaatattatttcagacaggccacatttgttcaagtacaaatggattgaaccaggagcaaataagcacaattaaacaacatcatccaacaactactccctccgtttcacaatgtaagtcattctagcatttcccacattcatattgatattaataaatctagacatatatatctatctagattcattaacatcaatatgaatatgggaaatgctagaatgacttacattgtgaaacggagtaagtagcaaatagcagcaataccactaattcgtttgctctcgtagaaaaatcatttgacaatagtttgtaggttataactgttgtttctgaattagacttagaagcagttgtggcttaaacataatgagtttgctatcttccgataatatttgctttgttatcttgtgaaacatcacttttcctgtgatttagcctgatatgatctgcagggagctgatactgttgtgtaaaatttaagtattgtctcagttttagctagtagtatttatcataaaccaattctgttacgaacaaacaagaagaatctacacaagcaacatacagtaacacttatacgtatgtaaacaatgtgcaaaaacgcagcaccagaattcctaaggacacgagaactgatttttagaggaaatgcagcgagatgcaaaatttgcaacctttttctagtctgcaaagaattaagtggcaaataataatccagctaagctcatccataaaacatagcatttcctcaatacaactccatccattcataacatccgggtgaaatcagaacaggaagaatcaagcctcgtatcacaatacctctaagcaatagagagacatctactccagggtctaacatattccgtcagaaacaagatcaaacacaacccaaaaaaaaaattaaaaattaagagccatctttttcttgacgatattgtttcattcacttgtagcattatctctaaaagattttacatggatatccatcactactatcaattcctatccaagaaacccaagattttacacaacagaaaggggaaaaaaagtagcaataaggaataatcagctaggcaagaagagactaactaccgggagaggcgcggcactggtcgaagcggcggagcacctccgggtcgtgcatggagagcacgaagcgcgagagcgcctcgaggaagagcgccgcctggtaccccccggcggcggcgacgagctccgaaagaacgcctcgacggagcctgttggcatcgagggcgacgtccttgagctcctccaagaacgcctccacgtcagccgcgccggacacctcggcggagatgaaggcctcctggacacggcggaggcggtcggagattgaggggacggccgcgcggatccggcggtcgacgcggtcggtagcggcgaggagccgcggggagggcgaaagcgaccggaggagggaggttacgagggacgggtggaggtcgccgacccacaggaaggggagctcgagaggcgagcgccagtctccagcggagacggcctgggcggggtcctggcgggcggcggcgtcgagggcggaccagtgcgcctggaagtgggcctcgacggcggcggcggcggaggaaagcgggtcgtcccagcctccggacgaggaggaggaggaggaggagagcgcgcggcggagcagggggaggagcggcgagcggagggtggatagccaggcggcgaagaactcccgcatcggccgcctggcccccggagccccgcgaccaggaggaggaggaggaggaggcctcggcattcttgcggctgcggtggcgcggcgaggggaggcggtggttggccgtgcccggcgttagggattccgggggagatcgccgccgattggagattcggagggagggaagcgtgggtggggaacggagacggaggtgggcctcgactgcgagtgatgtaggagagttatgggctggcccattttctttgtgtttctttgacattcaaacatggtctaaatccaaaaaaagttttataatttttaatcatattttacaatatttccctttaatatatgatacaactcctagtgcaaagtgaaacaagatatactttacttggtgcaatgtgtatttagtctgttgtacatctatgtatatgatgtcctatgataaaagaaaatgtatacgctgttccttgagagcaactttagttggatccatgaatacatccttgaacggtttttaaggttgagggaaaaaagtttgttgttgtccctactagacccctgaaatagaaatacacctaaatcttcccacatcctcatctgtcttttataaaaggaggacatctctgccacgttcacccttctcatccttcattccttccgccctcctcatccttcattccttcctttggcgcggccttcaccgcaccgccggtcttttctaaccatttatgcgccgaccgctccctcccttctctactcattcttgtactcattctcgtatcatctcgctcggctagcctctgctcattctcgtatcatcgcctccgagtgaaaattcttgcatcacctccctccctccggtgaaacacgcccgcaattcactttaggcgtttaacatttctacttaagagaaacgtccagggtcttccgtctagctacacaagatggtaggctagacgacctaggttcgaagctttatcccttttaattatttgatattatatccttccctaatattcacggacatttctacttaagataacacccatgccttcatggacatattaattcatttttaaaatttaagaaagttgttttaaaaaaatcatattaattcatttttaaaatttaaaataattaatacttaattaattatgcgtgcgctaatggctcacctcattttgcggatcttctcaatcttctcttttcctctcctctcaataactcctaattgtcgcggattattatctacttaggtataagaataaattaaaaaacaaaataataaatagatttcaaaagattatttagcaatgcagtaaaaaaataagaaaaaaatgctttttaataccatagaccaaaaaatcctataaataatctgaaaaaacggggcctcagccgctacccgtgtggcttacatgaacgatgaacccggccgtaacaaacagcccagcggcccagcccacgcacgcctccgcgccgcgcctcaacacgacggcgaccgagccggcgcgggctgcttccggctcctcttccgcaacgtcccgccgcagctccgccccgactccgacgacgacgccctcctcttcccgctctgcgaggcctccgccacggcggggtcctctcctcctcctcctccccccgccgccgccgcgctcctccggttcacgcgtagcgcgcggcgcagcccctgatcgctctccccgagatgcttcacctgcatcatctcgtcatatcgatcgatcatgagatcccggctattacatattatcaggggaaacgaattcgaatgccgagcaggggaggataggagtttcacgcgagtacgcgacggcacctgtacggcttataataccttgcagaagagggagcagtagtcgtgcccggacggcagcggccgcgcgcacgcggcgcaggggttctccacgctcgccgaccgcttcctcgccgtgcgctcgttcaggaacaccacctcgtggtcactcaacgtgtgcgactgcacgcccgataccatgtaggagtaagactcatgatcagtacagtacgtctgtacgtgacgatcgaattggtagctaattaaaggaacgcttgaaatgtggcaacccgagatcgctgtacctggatgccgttgcaatcgaatagctttaggtcgtcgacgcggacgacgaagcaggacgcatacttccaaatctgttatattttcctccatgtcagaccaagtaaagatcggccaaaagctcgaaacacgtacggcgtcgacagggcatggctgggggggggggggggcagggcatctcaccgcggagaaacgagggacggcgtcgtcgtatcaatttacctgtaggacgccgtgggaggcgtcgtgggggaggcagtggcggcagagcgcggcggcgcagtcgacgcagaagtggttcttgtcgttcttgcgctcccccgggtgcgcgccgcacgagtcgaagaactcctccgacagcaggccgcgcagccactgcggggcgccgcgaacggccggcgactgcatccaaggtcaccgacgacgacgacgacgatcgagctgcgggttggcaccaccggcacggtcaaggctgcgtgcttagaccacagtgcggctcgaatggatgggatcatgggatcgatcgaggaatgcgggcttgagacgattgtctcgattcaaaaagcgaaaaactcggtggttcggcaccgccatatgtgggcgcggctgctctcatcgtctctgctgcacgcatctctcgcgctcttctgttcttgtctcaggctctagcctctaggccactcaatcactcatcctagtcataggaaagaagtccatctgaggtccctcaactaagtccatcttttgttgttaaagaagttttatctcgtgtttgattgggaccaggggcggatccaggaaaaaaaaatttagggggggggggctcaattacacaattttttcaacctccagccaactaggaacctttagtttatcattcatcgtgaaaaaatcgaagggggtgctccgggggtatccatgagttttgtgggtgtaggggggactcaagtccccctgcaccccgcacctacgttggatccgcctctgattgggacttgtatcaacccaaaggtataaatattcagggtcattgtaatctatctacacaaatcgatacaattacttttggcgcattgccaccttttattccagcaagttcttagtttcgagttacgttgcatcgtttcaatctctggtgaggaggtaagttcggtcaattgtattatactgttgtttggagtcataatggcatagttatggctttctcagttaaatccgatattctaactaagttggtgtttctctaatcatactgttgttttttattgatcaatatattcgtcgcgtttgcgtagatctatcggctaaataagtttattatcgtcaatattatactgtctcagttaggtccgatctattagggcttgttcactttgctaccattttcaaccttaccaagttttggcaaatctaaattttggtaaggttgccaaattttggcaagatttaatatgtacctattaaaatttagtaacaaactaaatgtagtcactttttttttaactttgccaaaaaaaaggtaaggttgaaaatggtagcaaagtgaacaagcccttaatttgctactaataagtttaattttagtaaaccgatagatttttatgcaatattccatcatagttctagccgataagttatcaacattatgagttttagctattaaatgtatgggcaaactagttgatgtacatgtgaatctacttacatgggatttccatccgatgtatgctttaaccattggagttgcatctatcacactatgtcaatattagttgattggttcattggttcaattctttctatcaattcttgtaaattgaaggatcaaattaattgacacgccatgaaccccaactttagaacttgcattggatttaagcagatctctcaaatctttctatgccacgacatattttgtgtcaaaaaaaatatcataattgttaatacagatcctctatgatcgactttgtggttgagggaagagactcagtctcaacctgcagtagagggaggtcaaataaacgttttcactcatacaacaaacagtactaggagaattgtcatgccgtattgggcccccatattcgtgggcctgaagctacggcccgcctgtatatgatgctctggattcttgcatggacagcccaagcactaacaagcaaggcccacgagccccaagctcccaagccagcccagccaggtttcgattcgtgatcggtgcagatgcggtctaccggtctacccgtctccggcgctacgggattcgatctgagccgcacaaaatgaacggacggctggagatgtccacaggtctggaattggggagcggttccggtagggccggtggcctccccgtcggcgatcgccgctcgcgtcgccgccgacgacaccaggagctccgcctgcccgccgcgcgcaggaggaggcgaggttggaaggcggtcactctggcgtggtacgtactgagctcgtctggtctttctcgtgcctccggctccgcttcgttcgtcaactagggtttccatgttcatcgcttcgacgcttcctgtaacttcagtgtgggcttctctttgttaggtgtggttgaatcatgtgaagtttatggcgtgcagtttttcttcattagattacagactccaggaaaaatgataatggtcgcaatttgcagacgtttcactgcaatggagtacagagaggtcaggaggagcatttgatgaatcaagtaaaggtgtacagaaaaataagcctactggttcggaacttttcatctctatttccattaagaggtcaggaggaggctgggtggtgaggttgtacaattttctttatctttttttttcccatttcaatcgcacgctaataattatttgggtttaaatcatatattccagtcactatcaactaattagaattaaaaacaattctagtgctacatttctaatctgggcatgttttgatggtatagaaccgaaatgtccgtcgtctttaatcaatgccgtttagatcattgggaacaattgagctggtgaagcagggaattaaccattatgggggttagaattgctatagtacctagactatgtgaaaatcgctgatagagcaatctttcatttgttttagctaagaatatgagattgacaatgcaaaagctaaataagtttactggggtaaacatggccagtattgtgatttaaagaattatcagtaggaaacatggtgatagtaacatgtatgctagttactactattcatttacacttgaagttggttttccttcataactttttgcaaggtttgattggttttaatttatgtgcttgcccacccaaattcaaggtaaaccatcagtttcaatgattatatgggcaccagtccttgccacagtccaaatctccttgcttacctcggtccatgcttagtcatcttgtctgttcatctcatcatgttttcctgatgaccatgtgacatgtcacacaaatgtacagaattcaatagaagtcagtttttgagtactcatatccgtggtctgtcagtgaattgtgaaaaggtaaatatgtccatgtttcttagctccggtttgctccattcaattaatttctccaggccttatgtcttctcagaggcatacattgcatacagatatgtattgaaaacattcctttgcctgcattcacagtcacatttacatgggtgcagacaaagtgtgggaatttggatgcgaagcaaccatgtttattgtgcgatcagcgttcggcaggtcagtctgataatgcagcgtatctgtaccaccgctgtgtgcatgtggatggccgctctgaggcgtgacatgtcgtagtcacctatgcaggtatttgcacagttctgatttaattattgatctgtgtactgaaataacagtatatcaacccaaatgagtaagctataatccttttggaaccgtcttactacttttgcttgtgataacatcatttagcttcctggaatagttcatatatgtttcttgcttcttcaattttacattgcaggaatgcatggtatgattgtataacttgttactcaacttccgaagtcctaacggcatttcaaatgagcttccaaattgttgaatttgctcttcaaggaaaatccactagaaaaaaaatgttgctgacaatacccaatgacaggtggatcctgctgcagtttacatcggcatgtagcaatttggttcgatgatactgctctgatgtccttgacgaggagggaaataagggtattctttatgaccgttttgtctgtaattgcaccagtaaagaatggagaactctatatctgaacattttgggctttagttttacctcttctgaaacttctgatgacaatttcttctgcattttttcatgttccaggtatataaaataaacccgtatcgacctttgtctgtctgctgtttgtggtgtcctacattgcaggagctaatctgatttgaatttttatgtttttagaacaagttaagaaagcaagcagttgtgccaaacaagggagtacaaagcagttgggtcataaaaattcaggacaggatctgttcctctgtgcgtgcactctgaaacatatgccatcatagtgttcataaccactggcccattcaagggatgagcttatttaagagagccacagaagaacttctgaaatgaccagggaaaagatgcaaaagccgtgatattgtggtagtagtacacaaagacattccttcgtcattgatctccaacgggagcagtgtctgattacacagtaaccgacctactcaagcaatcatgcgtgttcgttgcttaaaggatggcttttctttgctttgcaagtcttgatcccttcctgttcctccaatggcaagcaaaagctatggcttacccagcacttttgagttaggactatggctattatgtgaagagccatcagtttacttgtacggaaaataaaagcgaagctggcatagtgatgtaataatggtatgtatgtcactaacaatctccagtgtggcgtcttcagtaacatagtgttgttcagttagtttgcactcttgttttcatgtgttttactagcatagatggtcagggttgttctaccatttccttgtcactggacaactgagtagatcacaattatagctaccaataaatgaggtcgctgctggtttgctggggtagcacttcacaaagagagactattcaattttggatatcattttctgtcagtggccacctgctaatttgttcggcgtttcatgctggataaaagaagtgcacatcaagaagaggagtaactataaccatgtgatggaccgaatgaacttatgatacatcatgtgttttactatctctctaggtcagaaatactaggacaacccagatgaggaacagtacttcttgttgctgtagcttggacttaaaaggccagtcatgtgctgaactgcagatacttgatgtgctctcttaccttcaggattaaacaagtgactgcttccttcattgcagttgggttttatttccagtttaatgagcctatgattctgtgagtcgtcttctctgcatagtattataaacagaagaatagaagctagcatctgctgcttgctggaagtaaaatattgctaacacaggttcctgcatcaagacaacagtggtggaggtgggggacctttggagcaggagtttaggaccgacgcatggcccctccttgtgcatgcatcattgtacatatatgtacgtatacctgtacattcatatttacgagtatatactactacatttaaagaacacttgatcatgctttcaaatgtatctttcagactttcaccgtaccgtccgcaattgtggtccaagcactgttacaactgagtatgtgtacctttgagaaggtgattcaaacttcagtcatggcaccttgagtttgctactcatttgggttgcctggcttttaaggccttgagaagtttgagcttttcaagtaacttgtgcaggtgtgctttatacatggattcccctttatttgggtagattcagttggacgacaaagtgagcacaaactatacctgaaagctgaaagagaaaaagaggatcagggattggaaggatggattcaagctttagacagaacatgttgtaatgtcgcctgaaaagcttgcgcacggtttgagtggtagctgctttgcttagttacaaactctaggtttgatctttctaaaaatcgtaaattaggaatgtgtaatcttgcggaactgctattgacagagtgtacaaatggtgaaatgggtcaaagttgccggtcttaaaatcggaatggtttctttcagctcattccaatgcagaaaccaagttcagtcaagccagatgttctcaaaagagcattacatggataacattttcggggaagtaaaaagccattgttcatgatcgcaagctcgcaagaaaagcaatgccggtgatgatggcgatggtacagcactagtggctgggccgtaatcagtaagtatggagcaagaactcgaagctgtatacccgtatattgcatttctcagttcataaatataacgagatgctagcatacttatctattgctgccttcgaagaaaaggcgccaaaggatgagcaataagcacgcgagtatattgctcatgattattcaatcgcccagcagggcagtgcttgggttgtggcaatattcaaccagcagagacgatctgtttctgaagaccggagacgatgataacatacgagcctgacatccagggtatccatattcatctctgaataacctgcctattgaaaatccgcttctcggtttctacgatcccgatactgcctagtatatcttaatatgcccccgtactctacttacttgagaaaaatccatacataggcagattttgcatttgattatttgaaacaatattcttcgtacaaacccttgtgcaacatattcacacgtgccacaccacagtccacagctgatggtaaaagagatccttctggaaataagctgtagaatggctgtattttcgttataaaaagataaaataaaattatggtaaacgccgctgttctccgcgaaaccatccaaactcctaatccgtagcagagtgaagtactcacatggcgaacaggcgcctgaattaatgacgagcccagcccagctgctgagcaagtgtgccaaacccgaacgcctccattaacgcggcgcccctagctctctcctgctcacttgcccagcagccaggcagcactgcctctgcctgcgccccgcgacacgccgtcccaagcgagcgcggcgtcgcggtccctcgcgtcgctcgctctgatgatctgatgccccatggccaagccgtcgccttgcctccatccattccttttgtctttcctgatttcctcccgcccggaggaaaagcctaaaaagcctctccctccccgtcgaacacgacaactccagggaataaacaacatcaccacaaacgccacacgctgcagtgcagaggacgcaatccaacaatgcggtgcacatcaggcggctgtgcgcctgtgcggggtgcagcacagtggctgtacatgccttgaactcactcgcagaagatgtacagcgatggggagagagattaattggatttggacaggggtaatcataactgatgagatcattttacacacacctagctatgcagttaatggcggttggttgattaattaacccatgagcagtgacaaaaattagcgggcagggggttatcgggacgtttttacagcttgtagatgatgaggaagcaggggagcacggctcgccggtcgaacaccaccagctcgcccttgccggcgcggacggagtcgtactccttgctgggcacgggctcggcgtcggctccggcgccggaggttgctggcccatccgccacgcggccggcgatcaccctgcacaggaacatggcccgcctgccggacgccggcccgcgcccgttggcgtgcgcgccgccgctgccgtcgaacgtccggatacgcagcgcgtcctcgcccgcggccgaggagcacccgtcatcaggcggcgccggggagaagcgcatcatctcgttgccgtcggcggcgctgcgggaggccccaccggcccgagcgcgcacggcggcgcggtagtcctcgaagcgcgccacggcgcgcgcggggttgtggacgcggaacagcatctccacctctgccgttgacgcgccggcggcggcggtggaagctaccgcggcgggcaaagccgcctgtgtcgccggaagcggagaccacgacgagaggaagataatctcgacaacctgccgcgacgagtgccccgccgggagctcggtgagcgccgggaccggaccaagcgggacaggaggaggcgacgacggcggaacggatgccgccttagccttgggcttcctcggcttggccggacttaccttcgaactcgccgccggcttggccttagacgacgatgacgacgacgacgagacgttcttgtggttgtgggcgtcgccggagctagcgcagctggagcgaggcaggtgcaggtggggcttcttgggcagcgccgtgatggccgcggcgacgtctccaatcgccgtggacttacaatggaacgaccggacccagctccccgccgccatcgggcggcggcggcgtggcggaagcttctccggcatttagtagtgaccggtcaccggtggtgtagttagtagtagtaagctagctggagagaagtggagaggacgtacgcttattatggtactagtatccctgttgctcggcaatttgtatatggcctaaactttggagtactgagatataggagatgcttctggcaaactgagtaactgaccaggttgcgcagcagtcagtgcatgagtagtacagcttattttatgggaaggaaattactgtgtatatttactgtttacctcagatatcaacagtgacatcataaggtagctaggctcgtactccctccgtaaaaaaaaaagataaaaaaaagataaaacctggtttccgtatctaacgttttaccgtccatcttatttaaaaaaaatataaaaaaaaataaaaagacaagtcacgcataaaatattaatcatattttatgatctaacaacaatgaaaatacgaattataaaaaaatttcatataagacggacagtcaaagttggacacgaaaactcagggtttgactctttttttttttaaggagagtagagtcgtaggaatcgtgtcgaacaggcaaggtatgtggcttttttttttctgctgtatcctgatggccggtgttactgttggaacagtttagacatctcaggtgctgttaaactttagtatctgtatttatttagatactaatttaaagtactaaatattagattatttataaaactaattacataaatgaaagctaatttacgagataaattttttaagcctaattaatctataattagagaatatttactgtagcatcacataggctaatcatagattaattaggctcaatagattcgtctcgcgaattagtccaagattatatgtgggttttattaatagtctacgtttaatatttataattattgtccaaacatccgatgtgatagtgacttaaaaaaggcgatctttacccgtagtacgtacgtgttgcaggcattgcagcatggttttttttttaggcactgcatattggtatagcgtggcattttggccgcttggttattatggtccctatcaattggattttagtccattgatatatgtttcctagctacataattgcactcattttttaaagtaaattacacattggaccatttcaaagtttcttttcagacaaccttttaaacaatgttttcactttaaaccaaccttttaaacaaagttttcactttaaagtttaaaccagataaatatatcattcgttgcatcatccttcctttcaatatatccagggcggatccagaaacaaaaagttggggggactcaacataccgagtacaccgatgtaaacacataatctcagtattaaactatattaaaatgctattatgagacatttagcacctcctatcttatcaactatgatgaaaaaattgagggaggggggggcttagggggtatccataggttttgtgggtgtagggggattgaatccccctgcacctacgttggatccgcccctgaatatatctatttttctcccttaacgccaatcaatctacttaatcaacgatcctgcaatcaggagagagcttcagcactaccaatcccatcactgctcgatcagtcgctgctacgattgcttcaagcccaaggccaaagcacaagcctggtgataagggtggagcctgagcttgagcctgaggcctaaggaacggacggagttgaacactgaatggagcaggggcgcgaagactcccttttaaatctagttttacagatatgtaaaatttggaaatttaaaaaatctggcttcaccctgctgaggaacgtaattattgaaacgagactggaccgatagtccaatcgaaaaaaaaagaacaaaaaaaactaggctagagctcgagctcgtaccttctttttcatccgagcttctaacaataagttaatgtgtcccgctggcgtgaaaaaaagatgagcgaaaggtgtatttttaaagaccctaatgacaaatattgccgctcaataaaatttattgagtaaaatgtactagcggttcttaaacttgtcatgaggtttcacttaggtccacgaacttgcaaagcgcacatccagatccttaaacttggtttattgtatcatcccggtccaaagcgtcgtttgaccgtgatctcgcctacgtggcatgccacgtggacaatgacatggcggttttttcctttcccattttctttttcctcctattcttttatcttcttcctccactaaagccacctcgagctccccccgcgtcgaagaggccgaagaagagagaaatgaaaaaggaagaagggagaaaaaaaagaaataataataataataataataataataataataataataataataataataataataataatgtgtcatgttgtcatctacatatcatgccacgtagggaagaccacggttaaatgagattttggataggaatgatacaataaaccaagtttagagacctcgatacacaccttgtaagttcgtggacatgaaatctgcttacaagtttaaggaccgccagtgcaatttaacaacttcaatccatccgttcacacagacactccatcccaaccactagtacagtacgtgggagttaaatgctgcactaattgtcgtttggtttgcaaattaaatgaaaatcccattcagaacatttcggctttaaacacgagatacgatcatacgacaatgcatggtcgtacataaaaaaaaacagaacagaagaaaacaccattcatcaatcgaacctgttaggttgttcccatcacgtacacccggccatgcacgcacgcgcccagtacacagtacaataaatcgaaatccgaacactcatcgtcttccacttggagctttcctccacaccaatgcacaagataggcatgtgcacagtactccttggcacacacagtcacacaaccgtcacccatatggcatcgcaactctctcgctccctccaaaagctcactgccacaccacgcaacatggaccgatcgaagcagctagccgtcccgatcgtgagattccacgtacgcgagtcgtacaggtccagtggcaatgcatgcgcgcgcagccgttgcgctgctgtgcacgtcagccgcgcgtcgcgtaaaccgcctgcctgcctacctcctcgtctcgtcgactcgtcgtctcttccccccaaaaaacgttccgcaacggcaagcgcgccgccgtgacatcggcgccagattccagaaacacacacgggcaaaacgcgccagatcggtcgatcgatcgagatggcaccgattggcgattggtcgcgctcgtctgcgtggtgccactggtgcgtgcgggattgagatccacttcgaagtccccgtgtctttgacgacacccacgctgttgcttgcccgcccgctcggtggattggatgatattgtttcgttgtctaagagcagttacaatagcaagctataagataactataaatatattttaaaaagataaaggaagaaaaagaaaaacagcgggctacagatatgtagccagctgcagcacggactctaagacgtactgtgtgtatgacaggtgagaccagatattaatagtatagtaaacaactattgtataaattggctattacattggctatagattttggagttagtagtggactatactattaagctgtgtttggtacccttagttcccaacatctctcccttgtgttctgcgcgcacgctttttaaaatgctaaatagtgcgtttttttcaaaaattttctatacgaaagttgcttaaaaaaatcatattaatccatttttgaaaaaaataacgtaatacttatatcgacgtttgatgttgcggtttcggtatttgcatagtatatggggatcgttggtactaggatatatgcgagattgtactaaaaaagatggagacgtggatttttatacaggttcgggcccctgaattgtcaggtaataaccctactcctgttggccgaagccggtcgttgctcttattcaccataatcacaccggcacaatatttggggtaacctatctatctgttgtcgacatggtggtctgagtgctgactcgtagtcgacaacagagtagtcttcctcctcgaatccgtgtctggcgagatcagagacaacgttagatccctcttgacggtagtcgtaggtaccgtatggggactactaggcttatctccgatgttgatatctggcggcttatcttggcgtatgttggcttgtatgttgatctattgtttcgtgtcccctctcctcctaggggaccttgtattgatacctataggtgtcaatacaatatgaatacaatccgagtagtccttgtcgttttcatgtagaactctatttatcattccttatgcagaactcctcatatatccgaaggttgtttccgtataagacatgatatgtggtgggttctactgagatttagtcaactactattagatatatggtatctataaccctgacaatttaattaatcacgtgttaatggaccactatgtttttcgtgcgcagcatttgggtttccaacccagaagtccgaacacagccttaaacttgctacgatcctgtttggcgcgcaggttggcaagttaggctggagggacgccatatgattccggggcgatcgtcgtccggtacacgatcgagcgggattattggatctagttgcacctaggcagctacgatcatcttctttttaatcagagttgctattttgttttgttctgttgtctggatagtatgcgtatgtttaggacccatgtgatcaaggttgacatgtctttatccaattgttgcccagcatagctagctagtaatagtatagtgctagacagtagacacatagatacattacacagagttaacaatgcatgttacttctttgaaaagtagcaaaatggctcatgattgcaggtgtggatatatttatatatgcaacgtacatgatcggtagaagacatacggatggactcaaattagctatccgagttttattgttgccgaaggcaaactatccttttcgattttgatttatttgaagtttgaaatgtcgctgcaagttcgtagatcagcgtgtacgcatttgaacaaaggcaaatgagtaaggtgcgaaaaagtgatctttctcttcgtccgcaggatcgcggtctctcccgcaccttttaacacaaacgaaattcgcacgagccaatgcatactgcatactttgcccccattcagtcctacgatcgaggactcgaggtgagaaagtaaacaaaaaagaatacgacacatgacattttatagtccaggactcatggtgataccgatatgaaactaacagaaacgtggggacgcgcaagaatattcaccacaacccgagttaaaaaaaagagagctccgaattgaactacgtactcagcaccagtatacctgagtaccactggtccgttctatacacgtttaaatttgaaagttcaaacaaagtcaaacagaaaggattacgattactaagagagattagcgacaggagaaagccatgcaaatgcaaagcgttggaatctgtaataagatactccggcccaagccaagttcgagggggatttgaacggagagaggctgagaattccgaggcagttgccggcccaagccttggcacgcccacgcggataaggatcctctgcagtcgactgcactgtgccattgtcactgacatgtgggtccccagtcgaagtcgactgcagaggatcccaatcccgcccacgcgggcggctgtacgctgcggctgcggctgcagcgcgtgcgtgcggagacgtgccgaagtgttggcccacggcggtggctgccgcgccctgcccgatggagagagggaggccggccgcgggcctcgatcttcgatcttggggaggaggccggccgatatgacgatatcccgcgcagatggacctgcacgtcctggctcgtcgagacgtcaatgtgcggcagcgttggccgtttgttgcagatggggaacgtggaaatgctgctggggatggatggctggacggctggagcctggaccgcttgtgtagctgatctcctctgtgatgtaccgcagtttttgccagcgtagtaaaaacgacgtgtaccgtcactgccacaccgccacctgcgatcctgggaaaaaaatggctcgttggttgcgacttactactaacataagtccataattaggggttggatacaacatgggccagtttggtcacgcacaagatgtgacgatacaggcatacagccatataggcccaataacccaaaccaaaccaaaacatggatctccgtagtttgctgtttcggtcggattaatccattccactttactccagccaatcctggttcccgaaatccaaacgaacgcaaagcccccaaaaaaaagagtaaagcgaagggcaccttggggctcgcgtctgccggcgcgcatggctcccgcatccacctcgccgccggcgaaggcccaagtgacgacggcgccggcgaagtctcccctcgtcggcggacttgcggatctggacgcggccgtgtccctccgcctccacgccctgttcctcccggttccccgcctcctcctcaaggccctcgaggtcgccggcgacggccgaatctggctccccgtgcccatatccctcctcctgatctccaccaccacctcttccaaggtatcccctctcctcgtcggcctcgtcgccggcctcgtgctcgacatcctcttcgtcggcgccgccaagctcatcgtccgccgccctcgcccggcctacaacgccgcggacatgtacgtggccgtcgccgccgaccactggtccttccccagcggccactcctcccgcgccttcctcgtcgccgccttcctcgcggccggcggcttcccccgcgaggcgctcttcctctgggccgcctccacgtcggcgtccagggtgcttcttggccggcactacgtcctcgacgtcgtcgccggggcttgcctcggggtgttcgaggcctggctcagctctttgttgttgagggcgatgtgtgctcgcatcagcttccttgtgtgctagctattgttctctcacgattggttgcagcatttctgtcccgatttgcaaattttgtgagcaattcaagtttagcgaatacattttgtacttaattcttgatgaattgagcattatgcgaagcagcaaaggagtgatcaccccaattgcttctctaagattagttaattggtagaatggttgctatatatatactccattggtagagtaaattactgctctttcatttctgattgttgcagattagagtgatactctaacattgttaatctgagtatctggttgacttcatatataaaatgtgttcttgacggattgttcattgtctatgttgctatgcatttgaacagcatagcattgctagatattccatggcagattgatctaccatttataaactcagcagagggaagtgttaacagctgcaagaattttatgttagtaacatggatcattcatcatcgatctcaggtcagtactcctcttatccagttccagtgagatgtgcatattgctctagatgactagatcagcactgaattaacagataagtatggtactatttttcagtgttgtcatggatagtagacattatggtctatgggcctgaaactgagagatcatacagaaagcaatcaataatcaatactaccaggtactgcttgaaagttgagtaagaaagcaacttaactctatactattcgtctcaatgggatgtcatcatgtcaattcaggacatagactgtattactgacaacaatactggatgagaaaacaaaggagccagtggccccattgctggatgaaatttggaatacttggctgcacgacctgggagaatgcaagatgcgagtgtgcctgctgtccctgttcatatcctggtgttgctggaccgtgacacatcgatgacaaaagtgggagatggaatagcaaaagctgaaaagaaggttgtttcttgcgtggaagctttggatctgaacagtgacctatcgttgcttagctccaaataaatatcctgaatgcttatctggttatctggcagctcatagcctcataagcgctagtagagtaaaaggcttctgttttctgtctgaaatggcggttctcttgccctttgaatttcaacatagaagtttgttttgtggatttaaactagagacaaatactaacctttcaatgtagcagtgattttagcatttagttatgttatgtagattgccaatcaaacaatgtgggaaacaagctggtggctggccacggtgttcagaaattgagcaacaagctggtacgccatgagcccacacgatttgatagctttcggtgtacattcgatcatagcatcaataattcctccatttggattggatactcggtgcatgtcagctcacaacccacgttccatgtcggagtaaaactcaaatgtaagcgtataagagtaattctaaactaaaattaaaattttcccaaatttggaatgcaaggtactgttattttggtaagggtggcaagaagagttcgacgtttcgacgctgagtcagacagagatatagaaccaaaaagaaaagaacaggtaaacggaaagcaaaaggagttgggatatttttcccaggcgacgtgggcggcgtatccagccaatcccaactggcgctggcgcgagccgaggcgagaccaactaccaatcaaccaactaaccgaacagcgcgcgcaagagatgaagcggaaagctagcagcagcagcagcccagattgcccacgactcaaactcccaatccccaaccaatcgcctataatccttagtatagttagtttattccaacccgaattccaacctcccaagaattcaatctcttgttccgtttcgcttcttttaattcaagattgaatcaattacatagcgtgtttgcttgtcgttgatgctttgcttcctggaggaggaaacgcccgcacacgccgccgaccacctctccgtttccttggatctttcagcttcctgttcctcacgagatcgagaaggggggaaaaagaaaacgtcggtttttagtctcgtttgcctcgatcctctcgttcttggttggtcggcgccatgagtaacaccctgcttcgaatctacccttccgagctgaagataccctgtgagtgcttcgacgacctgtcctttgttgttcttgctgtttcttgattgtttaggactgattcagatcgcctctgtttcgatgctctgatgagcagtcgagctcaagaggcagaattcggggatcctggagctcacgaataagaccgatcatcatgtagccttcaaggtgaacacaagttgacagttttttttttgtcagagttgctgtaacctgattaggttgagttgactgaatgtctgaatttcttgggtactggttgctcgatctgcaggtgaaaacgacgaaccctaggaagtactcggtgagaccaaccaccggaatcgttctgcccagagggtcttgcggaatcacaagttcgtcttgcttcctctgctgctgtacattgcccaactgatcagttcatcgtgtttataaacgcattgctgttcttgctctgaaaaatcgttgcagtatctatgcaaccgccgaaagagatccctacggattataactgcaaggacaagtttctcatccaaagcgtcgtggtagaggatggcacaacgcagaaggacattcacagtgacatggtaaaatcctgcagtctcaatcgagttcatagatgctgattgatttatgagtgatgtactaaatgttaaatgttgcggtttgtagttcagtaaagaggcaggcaaggtggtcgaggagttcaagctgagggtggtctacatccctgccaatcctccctcccctgtgccagaggaagaagaggatgagattgattcccttgattcagatgtggaccatgaagtgcaaatgccatctacgttcgatgctgttagtactgacattgttgtttatatcaaaataacaatgatgatatgcttgttcctaatgataatttatttatgttcaggcatcaaggaagggatatacatctggatcgcaagcttcacatgacgaggttattatctttaagcattgctcgttggcagaatattccttagagcttactattgaactagacattaaagatcataaacacgtactccctccgtttcacaatgtaagtcattctagcatttcccacattcatattgatgttaatgaatctagacatatatatctatctagattcattaacatcaatataaatgtgagaaatgctagatatatgtctagattcattaacatcaatatgaatatgggaaatgctagaatgacttacattgtgaaacggaggaagtagtagtttgttgatttgttcagtataggaattctactgttctaaacaactaacacccagcattttaattgcattgctaacattcttgattgtttcgtggttctttagggcgtctctttgaccaaagctgtattgagtaaatatgtagatgaaaaccagaagcttcaacaagaactggtatggattttctttagataagaatttggagaaaattgatactttcaatgttttaaaaaagaactgaccgtttaattcgcttcaacttctccataattgaataattgagtgattcgtatgaaattattttttcttgctacctttaatgaggttcatatcatgatatttgttacgagacattgctccctttcgatagttcttttttacttaaccttttttgcatacaacatatcgtaaatttacaacatctgcgtgcaaaagcaccagatccaccaaaagaaaagagaagcaagactagggcagatcaattacttaaccccaagttgatctattgcaggatcttcttaagaagaaaaggtcatcatccgatgggggtttcacagctctgtttgtgccttttgtctttgcgttcttcgtcttcattggatacttaatggcgggaagcaatgtttagccagaatagctgcaaaacatacgcatcgttttgcagaattttgtccctctggctgatcaattctttctgtttctcttggtagaaatatatttcttcattataggtggttgtcttccgttcttgtgaagtataatatacctcttaaagaatgggagagaaccattcattgtagatagacaaataggcgttctatctctgaattgttcatatataataaacctctggttcattatacacacacgtttgcttgtaaatgtggttgagtgtaaatttgacctgcagtatggtcctgggtgagttccagaatcctttcacagagtacgtacccggttccaaattcagcggatgagattacatattgtagtaacattgtgatcctctgctcctggtcattgttcacccaaaagcttgaaactaagcaaatattaatcaaaaggtctctaaacactcacagtgaccaagaaacactttttattaatctcagtattgaacaatccgttaggtcagcaggaaccaccagggcctccaacccccagaacaaaggtggtaaatatgtggtataaagtaaacttacgtaaaagctcatgtaaatcctgactaaaaagtcatctaagttacacaactatataaaacttgtccaaatttgacttatataaaaataacaaattttgaacctatctcataaacaaaatcgagtttggacaagatttttacatgtgtaattttttcatttgaattttgatgactttagtcaaggtctacacgtgattttatctaagttaaaggtttccaccatatatttacctaaacacaggtctttttggggaaaatttgagattgtaagaagcattttgtaagcaaccaactataactagtgagaatttggaaaacaaaaatgagtttcctagcttctaattttctagattctgtagctacgacattgttaactttagttttgggaagcttaagatgctaaaagacaactggtaagcaacccagcttctaagaattttaaaaaataaaatgggatttctagattccatagctatgtccctgtcgcggacgcacaaaagacgcataccattctattagaagcagtacgatcttatttggtggagttgaaaattataagaaacaactgacaagcaatcaaccaacatatactgaatatgggaaagtttcttttagcttttctaaattaagtactgattcttaaacttaagtgagaatctagcctgttcaggggcgacggctaaaggacatagcaccactagtctacgcgattgcaaaaaagaagaatgcaagcctgcaacaagtatcgctttcccgaccaatggttggttgacctcggtttgccggtaacctcaggctggacgacagaactaattagccaacttgtcaatgtctagggtgctgttcatagcctgcagttgacagagtacgaaaaggacaagatcacatggaagctaactagtcacggcgaatacatgacgacatcggcctacaacgcacaacttcttggcataaaagcttcaatttcaatgcccctatctggaagccctaggcgccgcgcaaatgtaaaacattcgcttcgcttggcttgttatccaaaatagagtatggacctccgacagattggcaacccgtgggtaatcgaaaatggctccatctgcccctttgtcgaaggaatcaggaaacggccctcacctcctggcggagtgtagatatgtgaaagaatctaggcgacacttgcagactggacaacatgtgaacaaataagaccaacgttatggcaacaagcctcgacgctactcaagtggtgggaggccaccgcatgttccaacgaagcgccaaagaaagccttgcagactctaatgctattagtcgcctaggatatttggaatgaaaggaaccgcagagtttttcagcaccaagagcttccggtggctagtctgatagccaaaattaaggaggatgccaaaacatgggtcttggcgggcgcgaaacaccttgataggtggcttaccttttaacatgttcgggccaaaggccttgagacggtaaagttttctatttgcgcttgcgcatgtacaattttattcctctattcaatgaaattggtggctcactggttcattaaaaaaaaaagaatctagcctgttcgggaagaagaggattttgttcgtgagagagagagagagagagagagagagagagagagagaaggaggaggaggattttcaggcttcgcattgcccaacctctgcttctgttggcccaagaagaatcccaggcgcccatgggctggcagtttaccacggacctacctagcctaccttagctatctaagcgggccgacctagtagccacgtgcctagtgtagattaaagttgccgggccagcaggaagccacgctgcaatggcatcttcccctgtccttcgcgtacgtgaaaacaaacccaggtaagcttagaatcttcttgcccgttggactgggacacccaccaatcccaccatgccccgatattcctccggtctcggttcatgtgatgtcctctcttgtgtgatcacggagcaagcattcttaaacggcaaaagaaaatcaccaacttgctcacgcagtcacgctgcaccgcgcgaagcgacgcccgataggccaagatcgcgagataaaataacaaccaatgatcataaggaaacaagcccgcgatgtgtcgtgtgcagcaatcttggtcatttgcgggatcgagtgcttcacagctaaccaaatattcggccgatgatttaacacattatcagcgtagatgtacgtacgatttgttaattaatctacgagccttgctagggcaggtgttctgccagccaatccagatcgccctcgtatgcacgctcacatgatggcagggcagggttcacatgagctctaacggtcgattaattaatcccggggctcgactataaatacctccctaatcccatgatcaaaaccatctcaagcagcctaatcatctccagctgatcaagagctcttaattagctagctagtgattagctgcgcttgtgatcgatcgatctcgggtacgtagcaatggcgtccaaggcgttcgctctgttcctggccgtgaacctcgtcgtgctcggggtggcaagcgcctgcggcggcagcccgtcgtgcccgacgccgacgccgtcgaccccgacaccgtcaacgccgacgccgacgccgtcggcgttcgggaggtgcccccgcgacgcgctgaagctgggcgtgtgcgccaacgtgctgggcctgatcaaggccaaggtgggcgtgcctccggcggagccgtgctgcccgctgctggaggggctcgtcgacctcgaggcggcggtgtgcctctgcacggccatcaggggcaacatcctcggaatcaacctcaacctccccatcgacctcagcctcatcctcaactactgcggcaagaccgtccccaccggcttcaagtgctaagcagcgtgcatatgcaatgcctgcatgggttgatcctacgtacggtgattagttggctttgacgactcttgatttgatttgcttgctgctctgtttatttgctactacgttacgtacgtactttgcatgcaacgcaacgcatgatcgatcgtgcatgctggctgtttgtacgtatcacggtaccagtttggattctctctgtactctctcctttgtcttctttgtagtactcttattcccgctatccgtacgtgcgcatttgttgtaagggccggtgctagcttgtgtgccggtaccaacttctaataaagctttggtttgcaacttcagatatatatgtacttctgtttgtgattgtttgctgtgtgtgtacatatgtgtgcgtgcacgactacagctccgcgcgtgccaaatttgtgagaagtttaacatcgttatatgatttatgcttttagttttaaaaaaatacttttataatatgtactcgtatgttgttaaactatacaaaattttagataccgtagttaaagataaaaatagttgactttaggacaaaactaaaatatataccatatatatatgaaacggagggagtaatgctaatactctagctttcggtactacatctctagaatcaaaatcgttcatactctctccatccatattataagtcatttgatttgtagtaagtcacacttgaatagtttgaaaaagctcatttaaaaaatcaataatattctaacatgaaacaaatgtactcttgaaaatatattcaaggatggatttactaaaactagttttgtattgtagatgcttctatgttttctagacttagttaaacttaaaacaaaaataatataaaacaaacatcaatgtcttataatatgtaatagagagagcccatacattcgtccaggttatgaaataacacgttcaattgttaataatgactatcgaacaactttaaaattttctatatgctttgtagttggtttcaaaatgggatatatatatactcacatgcaaatttatttactatcacaaacaattccgaactctagaataaataaaatacaccatgataccacaattaatttgtgtggtgtgtgcaatttagttactcatctcgaaattaattacttaaatgagctactcatcttattttgaggatgtaaatctcattgacacatgttacatgggctgttcgatcgttgccaaaatgccaagttgaacgccatggcggtcactacaccatgtccaaattaacattcccatccgactttagatggaaaaaaatatctatactgacatccagtcggtcggtaaaaatttttcgacaaacatacagaccggtctcttttaacgtagaaacacataatgtaatacttctttttttttaaaaaaaagccctcataaagaacaaagcgcgcaaaacatatatataagggggataatttgctttttattccttttcttaagtgcctaccttgcccgtgttactttcgagcacatcgtattaggtaaatatgacatccaacttggcatcaaacaaccacacgtcttgtatttaatgatatatgcaccctagagacaagataactactaactcacaagataagtgaggtaagttataccacctcacaagttagggaactgtcggtgtatcttactattcatattaatatttcaaaaacccaaaataaacgtttactaatatgcacttgtcttgtattatatatagaccattcaaatatgtttattatttctttactttttttcttcatttaataactccaaaacaatgtcctcgcaaaaaaaaaacctccaaaacaatgaatttacatagacatagttggtgtaagatgctacatttattacttattacttgaaattttacttggtggagccttagtttttctttttcgtaatcaaataattttatgacttgaaattaataaatatatagctttacctagtttggagtcttaatttcaattactatgattattagggaattcggtaaaacatatcaagtaataatcattgagtcatatatttacatcctagtttaattattcttaaatttgcaattaaggattagttatagttgtatacccatgtccctaaaaccattatcgttatgtccggtctgaccttatcctcaaaccaaatacatcccataatggtagaatgtgatacaaataatagaggctagacacatcaaacatttctagtccggacgattgctcctattggctcaccaacaaggcatgcagttgttaagatgatgtcctcatggtcagttctcgtcaagatttggtgtcctagcttctatcgaccttccattgtgaaagaaattaatctcgcattcctcacattttattcctgtcgacgcgtacctggtagtggtcgtgaggatagaataatccaaacaatattttgttaatccttacggttttactccgtcagtaaaagtctgttatctcgtagggagatttgggtttggtgtatttggagttacgaccctctagcgtgatgtgttatttgtgtgcctgcgcgcgcaagcgtgtgtgtatatatgtatagagagaaagatgagtaatcctttagtttgttttttgttccttaaaaaaaaggtgctactagaatgttcttagtgccaaacttaatagtacccaccgatcacaaatatagggcctgttcactttgatgtcattttcaaccttaccaaattttggtaaagttgccaaaaaagtggttacatttagcaagttaccaaaattttggcaatgccaaaatttaggaaggttttttttgcatcaaagtgaacatacccataacgattaaaatttatcaatgaatattgtgtaaagaacttgtagcctatttcctccgttccaaaatgtaagatggagggagtagctagctagtacacccccaccgaattgccaccctcatttagttctcacagaaatactataaccatactcccacctctcgtatatatttgtgaacggaagcggtagacaattaaatacagtaaatcactcaaaactaaaccacagagaggacagtataactagttctcaacatgttccgattttagttgtgctctactccctccgtcctaaaaaaaacctaacctagtacttagatgggatatagactagtacacatgtccatattcgctatactagattatatcccatttaagtactaggttaggttaggtttttttaagacagagggagtacaccttagtgagagtatatacaaattaattaagcacacctcttaggaaactaacattttttcagtgtgaactacctcctgagagcaagtttaatactagtatagtcaaatgttagctataaatcatttatagctaatttaatagtctattcatgtaatagttagttataaaaatatactacaccattaatatccagccacctctcatacaccgtgttaaagctggctacaaatttatagcatgctttcttctctctcttcttttttcttcttgatacgtggttatagttgacttataacctgctattgctatatgctctgggtgttgcactagatagtacagctgcagacatagtagttcagtgaatcagtactagtatatcccaagggccaataacgctacagcgcatacatttccacgctaggccctaccctgcagtgtgggagaatggttgaatcagtatgagccacacgtacaattaaaatatctctccaacaagatcaaaaaaagaatatctctccaacagttagtcattcataaccctgtgtcgtatgccatgttgttttcttgtgttagacccgttctgcaataatgcaactgtcacgagcccttgtttgttcttggcaacttggaaaaaaggaaatgacgatgatgcatgctctgccgatctggagcgtcgttgcttactcctattcccgccgttggtttcaggtaaaaggaaactcatactgcatgtaccaaaaggcagaagaagagtcacatatgcaagcaacctcaaagcaacgcacgtacacaaaatctcatggatttgtgagtgccaaacacatctccccgtcgatcgctggtcgtgctcctcctctgggccactgagtttctgttgcgccacttcgttgttcaggctatccgggccatctgccggccggcaaatgtgacgttgatgagttgtgcttcggccagtgatcacagagcgcgcagagaggcggccagggggtctagaaaaaagcagagagaacggatggtccagtccatgtactccatggggcaacacagcattgactgcgccctgtccacagccacgagctggacaagacccttgtcgctggctcactgccagttttatctttgccagctcaagatacacacacctttcgtatcactgtccacggtcatgcatctgatctggcctccatgcatgtgatttgggttcccttttatttccaaaaattcattcgtaatgacattttttttcttaatgtgaatcgaacatcatttttgataacaatccggctcaggtagggtcggccgagacccaataacttaagattgctcggaccccaacagttcttagtcacacccactcgggaaaatacccaatctcccaaaaagactagtccaatagggaaatggtggctctctcttttaaggtggctttctccttccaagctaagtaaggtgggattattcagaggctcacacggtcgccacccgacttttgcgtctttgccagcgggtaatagtggaggatgtcctcatcaatttttttgtgataatagaactctttttgccagtgtcactgacccatattttcttaacaaatgaggagtaatcaacactgataaaccgtaaagtgagcacaactcagcttattaggttcattgtgacgaaatcagtatacccgagctcaattactagattttacacgggtgcttgtatttatgattaattattcttttggtgatagacgacgtatatgtcaacaacaaggcgtccatggtgactcctcaaatattaagatatactgatctagacttttagagtgttgtgtgcgcacgtgtttcataggggtgaatgtagggatactgtgagcattatgtttgtacagtgtttcttacaaaatttaacacacgtagcctcggttgtctaggactatctccgttttaagttataagactttctagcattatctatattcatatatatattaatgaatctagacgcgcgcgcgcatatatatatatatatatatatatatatatatatatatatatatatatatatatatatatatatatatatataatatgtgaatgtggtcaatgctaaaacgtcttataatatgaacggaggaagtattagtcggtaagtagatggcagtagctcccaattaattcctgtcatttttccactcaactcagcgaccagtggaaacaaaccacttcaaatttttgcccaatgttcgcagcaatcatttttaggtgtactctatttaggaaagaatatactacctttaagacattacgagtacgtttgatggattctatacataaattatatgtgatttaacatttaattacttccagtagaatgataaattattttttggtaattgtagagagcgcggtttaaatggtggggatcaaacttactccctctgtcaaaaaaaaactcaacctaagagggaatccttctaagacaacgaatctgaatctggacaaaggggtagtccagattcattggactggagtggtctcatcccctcctaagttaagttttttttatggaggggtacccattacccattgtaccgcttgtccctctcacttcgcgctgacaatgccacttgcccatttctatggatttggcctaaattgtccacatttcatctcagatcgaaagctgctagctactccctccatcctaaaaaaagataaaccatgggtttccgtgtccaacgtttgactgtccgtcttatatgcaatttttttataattagtattttcattgttgttagatgataaaacatgattaatactttatgcgtgacttgtttttttaattttttttataattttttcaaataagacggacggtcaaacgttggacacggaaattcagggtttgtcttttttttttgggacagagggagtagcttgcttaaagtgagtgttttacttatgactaatgcagttcgtggtacaacacaaagaggtacttttgcgtgtggtattcttgaacagctagctactttttttttagaaaaaaacgagctagacttagctggtgttatatattaattaagcagagggaaaaatatttacatgcgtgtaagtacagaggcggaatcagacatggggcagctagggcttaggccccatgcctagctccataatccctattataatcttgaaaaatgctatgtaatttatgaaaatatttgagatcctattagctcagtcctaggtgtggaaattttctggctccgccactgtgtgagtatgtgacttgcttgggttataagttggcatgcaatagatgtgttttgtgaggtgttttatgcacatccgcatatgcatgacaaatatcgtgctgtcaatatctatcaacataagttgcaattagctcggcatagttttgcatgtacttacttcgctgtataggaggtggtgcgtcctgaaatgcgaattattacatgcatgcatgatttgtcagtcttaaaaaagatatgctcccctcatgtatgctggtcttcaaatccagatccgcctcttttgttgtcttgcatgcatgtatatcagcatctttgtgagttactaacaaaattggttccacatagatatatattgctatatctgacttatattaattaccttcagaggtaatcttaattgaaacatattttcttccttaagatagttgtttcccactatatacttcacacaaccgcatatggtgcgccctttttagtgcaaacaatattaatttattaacaactttaatttgaggccaactcttaggctctcgttattatttgtcacccacacttataaatcaaaatcatttaatttccatatataatatataatatataacccggccctatgcaaacaatctgtatacataaaaatatgatgtataataatcaattttgtgaaatacagtcgactaatcggaattatatatgtgaaatacatacagagagggtaccactcaacaattaaccgaaacatgaaaaattaatcagaattatatgtgcgaaaatttggcttatgcatatatatgtatatattttataatattatgagcttctttggatatttaaaaacataaaactatataagcctaatatgtcaattgaatggtcatagcttacattaacccaaaatatagcttttgatgctcatagttgtacaccaaatagtgatggagtttggttcatattggataaataaaaactactccctccatcccacaatataagtgattttgagtttttaattgcaacatttcatcactcgtcttattcaattttttttgcaaatataaaaaacgaaaaattgtgcttaaagtactataaataataaagtaagtcacaaataaaataaataataatttcaaatttttttgaataaaacgagtggtcaaacgttgcaagaaaaaacttaaaatcccttatattatgggacggagggaaacactaaataaacatatagaaacactaaacaaattaataagatcataaaagataaatatgctactttaaatgatcaagtgtaatatacgaacgattatttatagatgataaaaagaaggttcaatcaattgctaaaaatggagtttttatgctcataaatgataattgtactatgtatcgcgtcaaaaaaatagttcatgcccattgtaggtacactgggtaatatatcgtctagtgtccaatgtgatcaccacatgtatttggatcccactcatccaaatacatatgatgaaccctactgagggcgttgagggtagtttagcttggctcttgccctggttggttgtctgtgtggaatggttggcaaatacgggtttggttttgcttatatgaatttatgagacttttgctgctatctttgtgttgtatgacgggtttatgaacccggttatgttatatgtatcttgctgctctcttatccatatttatgcatttgtgatgcttatgaacagcttgcgatgaaagtgtgaggctggtcgctttttctagggactagctaagcatgattaagtgttttgagtaattgagatgatcgtgaaatgtagtgctttggttcaagtacccactgaggtatgtaacacatttgatcgtcgtctttgagtggtttgacgggtatatattaagttgaaattgcctagcaagttattctatcgaatatctctcttactcactactcggcatcatagttcatatattgaaaggtaagtgttaaccgtgatcatggacacactgaagatgagtgactatttttgtatggataacactcaatcaaatacatgtggtggtcacgttagacactgaacggtatattacttgggttgcctacatatacaaacaactaaagtaaatgactggtaagcccgttttctacaacactggcgcaaatccgcatctaatatatgtgcatgatcgatcattcaggatgttcttttattgtgaaataagcgtagcttaactggttaggtttctctagttggaaccagctcatccggatttaagtatcacatttacgtctattttttcttttagtgatagccaatgtaccatcaacagtgagacactcgtggtgacttcgtcaatcccaatatatgatggatcagtctttcacatatgttcatatgagaagggtgtgtttttgtattaatagggatgtgtgtgcacgaactgtgagcatctatatttgtaatgtatttcttaaaaaaaagtacgttactctcacaaaaaatcatatatgcacataatgtattaatcttggggaagatctgcgaatatggtttgtcaggaggagtcttttgacaacaacagattgctagggttctggttctctcccctacaaatacccacgtactctgctgagttttcgcacctctctctagttgcagaccatcacttacgtagccctgtgtgcaacggcgcaagtgcttgtacgctttcagctagcgtagccatggcttccagggcattcctcctcgtggctctaaacctggtcctcttcttcaccgtggccagcgcctgcggcaagtactgcccgacgccttcgacgccgtcgacgacgccatcgacgccgtcctacaacaccaagtgccccaagaacgcgctcaagttcgcggcgtgcgccgacgtgctgggcctcgtcagcgccgaggtcggccagccgccgtacgagccgtgctgcggcgtcctcggcggcctcgccgaccttgaggccgccgtctgtctctgcaccgccatcaaggccaacgtgctcggcatcaccctcgacatccccgtcaagctcagcctcctcgtcaactactgcggcaagaacgtccctagtggcttcatctgtgcttaagctacgtaacgcgcgtacggtgtaacgacgtgctagctttgcatgcatgcagcacgcatgcacgaacacatcgttcgttcttgagtgcctgcatgcatatcggtcgagtctttacttactctgttattagttctgaatgtagaactgcttcagatatcaatccagcgagttaactgtacttgatttgtttatgtttcttcagttaatcagtttctgtcatcatttggtcaattaatggaggttttgttctccaaggaattgcatgcaatggatactcttttagattgaatttggcgtgtctatgtctgggtgtggttgtaatttgcttgcagtacgttctcgtagtttaattgtaagcaagcaattgtacgacaaaatgtacttaggacagttaatttgttggaaatttcggtgtgaattattttttaaaatttacatctgttccactaagagacaacatataacagtagattggctctcaattttgttctttttagttggagggaaaaacagagacacaacatatatagaacctatatatatatatatgtatagagtttgcctccttataaattaatacacgctcaactagtatatatattagtgattttggattttaaagttcaactctacgggcatgttcactttgatgccaaaaaaaaccttaccaaatcttggcattaccaaattttggcatagttgccaaaattttggcaggatttctttggcctgttcactttgatgtcattttcaaccttaccaaattttggtaaagttgtcaaaaagtggctacatttagtttgctgccaaatttttgtaactatataagaaatcctaccaaaattttggcaagttgtcaaaattttggcaactatgccaaaattttggaatgccaaaatttggtaaggttttttttggcatcaaagtgaacaggccccttatatagttaccaaaatttggcagcaaactaaatgtagctatttttttgacaactttatcaaaatttagtaagattgaaaatgacatcaaagtaaacaggccctacttatacaccatgtcaccatcgtaaaacaacgtaggtgtacgatgaaattaccaccgaaatcacgtcgattaatccacacgtatgtacgtgttttaaaccgtcatacaaaggcgctgcatgtatatataggccgccgaacagtactgtattcctcgtgataagcctacttcaccgtgagcacaaagaaagccaattaggaccgagtttagcgcctgttcactttaacgccaaaaaaaaccttactaaaatttggcaataattttgataggatttcttatatagttactaaaatttagtagcaaactaaatgtagccactttttcgcaactctaccaaaatctggtaagattgaaaatgatatcaaagtgaacatgctcttagttccaaattttttcttcaaactttcaacttttccatcacatcaaaactttcttacacacaaacttctaactttttcatcacacattgtttcaatttcaaccaaacttttaattttaacgtgaactaacacaccctagaacaaaattttccctactcctagagtagtaatttggaagacggcggaaccctccagaagcattcacgtgaatacgtgacgccttcttcaggcttcagctgtccaacatgacgcgaacgtacgtagcgcgacagggttgacgtgatccatgcaggcctcttctgcgtggccaggcaggcctactggcacatcgatccgcttcacccaagaagcggattcctggtcgccggacggcacagccgcggcgcagacgcgcagtgagatcttttttacctccacggctcgcgcgcgcagctgcagtagccagtgctatgagtgttgggacccaacctgccaagtgccaaccaaaccaaaggcggcagatgcgcggagccgggagcccgtgaccgcgcgtgggcctgccggctgcggggtggctgcaccaccggccactagggatgaaaacggagcggatagtttccgtccgctctggacaaaaacggatacggatacctttcgaatcggataattctcggatagttcggatacggatacgaatacggatattttctcccggatacgaatacgaatatggtaccagattttccgtcggatacggataataattcggatatccggtgaacagtgctattcggatatccgcaggacccatgagacataccccatttctttctaattctataaccttcaatatacctttatagattttaatagtagtttatctcttaacactagtccatactattaatattatttaaattttaaaaaatatttataaattatacctcattttatataaaatgagctaattatatatgttgatatttgtttccattagaagttgagttggttttcgtgttccgagaaaaatttgtttccgtatttgtgtccgatcatattcgattcttattcgtattcgagataatccgtatttgtttccgtattcgagctatccgtattcgttttcgtatccggtaaaaaatatgaaaacgaatatgtatgagcattatccgtcaatatccgctccgttttcatccctaccggccaccggacgagcgcgtctgcgtctgagtagtttgtgcgcatatacccaccaaagaaggtaccgatcgaccagtaacaacccatcaggtgtccagttgggcgcgggggcggccgcgccggcccaccccacaggacggacgggcgcgcgtttcatcgccccgtgacgaggtctcggtttcatgtggccggttgcccggtccgtcccccgacagcttgatcacgtcgtcactcgtcacacgcgctggatttcttcgtctcgccgctgcgtcgggtagggcagcgcacggcacagtgtatgcagagatcgggttcaccgctgcgcacggcacgcatagtacacgaaatttagtggacgtggagtccgtgtgccgaacacgcggaaaaaggagtcgctgactggcagtgagatgtacgagatgtcttcattgccccgttggatatccggcttggattgagcattggctaatttatgaacacacagacataaacactggtgaatggaatcaaacccggccctcacaactccgtcatagcagcttatctgttttttttttaatcattgcagcttatctggtgaacagacttttctgttgttatagttgttcacatattcatccattcttacatcacagcgctacctactgacttttaattggaaggctacgtatacgccttgcgccaatctctataagtaaaaagtttttcgcaggatgttcccaagatgagccacatcgtcgagcgaagatgaccgttggatttatatgtagaaccaatatttaccgttgaatgaaatagaaaggaggtatctagaatcttcatgtggcttaggttggaaagattcatcagatgttaacagaaaggacaaaaacaaatgtgctataaagatagagatgcaaattaatgaccctttgtaatatttattttatataaataggtcataaagatggttttttagtatttttaaatggttacaatgtaaaacttatttacaaatagatccatagctcgggacgagtgtttaaaaaataaacatattttagtttagatagatttacacgagtataatacataaaatttatctagacatacataagtacattaccaaaaaaagaagtacgtatgttctaattagtatgctataaaacagggtggaaaactaacaattttcaataaagtaacatctacatgataaattcaagatcattttaaatgcataaatccttacaatactttagcggtgatcaaatatactaatcttataaaaatcatgggctatgaagactatgggtcgctaagagggacaaagagtgtgtatcaacaacaaggatagggtgcgctctttttccgtaaaggaattgaacataaatatgcatgctcttcgaacttataaatggtgtgtgtgtgttttttaaatgctacatccgagtttcttttcattaaataccatttttaaatgctacatccaagtttcttttcattaaataccattgtgtatttttcattcatgtgttcctcgaatcattaagctattcaacattccattccatttcgttcagcctaaaaggacacgtctaaacctaaacaaaacatgtttacttttgaacttccctattatgagaaaatttgaccaaggatggctactcatggccgtgtaaatcacttagcataattatcagaaactttatattatcatgttagtctattatcgaattgttataaatttaagagtaaatttcataaaactacagatattttgaccaaattatcacaaaactacagatttaaggagttgtatcacaaaactacacatttagcaccaaaattatcataaaactgcagattttaggttaagtatcacaaaaatgcatatttaatattgaacttatcacaaaactacaacttttgaagtttaaatccctagcaccattgttatggtggagctataaacattattactttgtgattaaattggttctaaacctatagttttataataatttagttactaaacatgtagttttgtgacacttcatcttaaatgtatagttttgtgatatatttggtgttaaatgtgtagttttatgataatttggtcatagtatctgtagttttgtgaaatttactctaaatttaaactaattagcacaactcaacatgtaaatatatttaataaagagggtggttatagttacgtgaaaaatacgatttaataggctatatatgaatatgagctttgtgagtgtccaatagcgacctttaaattacaaatccatgtgatatgtcatgagtgtcaaaaatacgattaaccttgattgaccataacttatctttagcaaaattggcaatcatctgctactcgttcaaagaaaagttcagattgacctcaatatctcattagtcacaacattacgtgcattaactagattgccaacaacatttgttgttcgatgactgtatcattagaaagatttattatcttattgcctatatcttgttcaccgtcactctcgaaggttaaactgaaagtgctccctttccttaaaaaagtacactttgttttttttaaaaaaattaaaagatgcaaatggttgattaagcttagtcctacaatttgactttttaaattttgcaagtgagttgatttggcatcaaacaggggattagctgagcctttggacctcgaagtccccaaaaccatcaaattagtcccctaggaaggacagacaacggcgaccatggacgccgccgcggccgatctcgaggcgcggcagctgcggatcctccgccgcgtcgcggacctcgagctcgccgcgcagcagcaccgcctgggggcgctatctatctccgcggcgccctcggggggcgaggcggagacgggcgccacggaggcgcggctctcctccatcctgaccgcgcgcggcgtgctcgacttcaccttccggcgcgtgcccgccgactactacgaccgccctctcgaggagcgccgcgacctcctccgcgcagattcagtcaatcaactctgcaagagcatcgtcatggtacgggccttccttttccttcccgtgcggcattttgtcgaacagttggcctgcgtaacgtcggcttggagatagctctttggatttgtgttatcagtaactttttagggttttagacacaatggtgtcgtcggtgaggtacaagataatgacttgatactttttgttagcatgacgtggtaattggtaacatgataaattggaaattgctaggtagtgaactatgaaagaaatggtttaagttgaagtatacagcagagaaggatagctgtagagctgctccttgtgatttggtttcagctggactgttgatagatgggagcagctttatatattaatatttttaaccagttggatcaacttggtcgagagcagcttcaatattttgacatcaaaatgttctctgttttcatggcatttgtagagaagagggtgtgtactgctaagcaagaaatgttgtgcttttgagcactcttaggaatatttgctcagctatacatgaagttttgagttgcattgaacttattgacattcttctcaactttagattcagaaatgcaatatggaccgaacttcactgcctatcagtgcagtattttatttattgaaatttaactcttttatatttggctaaaacaacattaatgggaggagggatgtgcaatattttgttatctgaccgtagagccacaatttcatgtttatgccaacatatctgtaaataatgaagcctttgtgttaatgctgatgttgaagttacctattaggtgaatacacaagctgctgcagatgttgttgactgcagcaatccaaagaattcaaaatattatgtcgttgttgttcaggtaaactgtaagtttgatctcaacacactatcttcaaatttaattagtacattttatcttcacacggatatatttgcagtatatggcacggcttaatgcagacagcatcaagaacttcatctattccctaaacgagaagcagatacccaagaagagatttaacagtaagatttataataatatattgaaacaaatctaatctctacaaatgccaccgataaccttttattggtcatcagcattcaaagcttccatgaaatccctcgaaggttttctcccatccttagtgaggtatatacctccctactatttatgaggtaaaaaaataaacctgttgaactgatcagaagacaagttcataattggcagtggcaagacttttagtgttagtagagaggaataggtatgtatctcttgactagcacaaatacctacacctctaaaaaaacgtaagagaaggtcaagaacatatataaagatgagttcacaatcctattctaacctataagattagttctggtacctctccatggaatgctatatctgaagtatgaggaggaatatacctctcacaggatgggagaaaaccttaattcctgaacaacatggtatgctgtgaattggttttaatatcaacaactaaggcaagcatcttgtctgatggtttttacatacaacaatatttttcatacggtggtatttttttcactttaaggaaaaatgtgtgaccatgatcaaagataaaggaatgcagtatatcgtgtgtagatttcagcatcctgcagtaatgttgcctctattatattttaggcatttcaagatttgtaggtgtgtctgaagacctactttttatgccagttctattctttaactcatgttgtttacttgtgtttgtgcagtgaggctggcaccagaagaggagtcactcaagcttacagggtttgttcacaatgctgttacatgcattggaatggaaacagacataccggtataaatgttgcctctaactttaggttttatgtcataagggtcaacttcaaatggggagatcttgcaagaatataagggataatcatgtttttgcacgctcatatataaaactctgtactttacaaatcctgttaaacctttcttgaattctaaccctgtctgcattatgtctggtgacatatatggttggtttcattttcaactctgagtaggacaaactgtcttatcaagttacacttctgatagattgcattttacgcgtggatgttttgagttcttgtatttcttgtttctctggaaagagagggtacatatattttgaagctttcaaggcatctgatacaatgagtttctacacaggttatcattgatgaagctattaccaagttagataaggatttcttctggctgggtggtggagaagttgacctcaagcttggggtgcggacctcacagttcctaaatgcattcaaaccatttgtggtgaagtgtagttagtgataactgtacaacggaagagaaactttgaatccatgtggttttaccatcttgatgaacacatgagacatcgccagggatgtaaaccaataggtttttgcttggatctggggttgggatgtctgtcttttttagagcaggcgtttctgttccagttgcacttctcgcattagttacactattttggtaagattgatgcagcaaagggggcattcttgggagaattgagataattggcacaagtgggcatgtactaaaaacctttgtagttcgtgccttcaatatactaggatttactctcagttttgcgtttctaatcagacacctggctacaagtttgtttttttcttctgattgctgaatggtgccatacaattgttcttttgaggtgatgttgtttgggggctttggaactagtatcgttgattcaagagcttgtgctggtctgctggatcaaacatgaagaatgcaagaggctggagcctgactgatggaacgtgtacaaagctccatctaagaaaaaaggaactcaataagcagggactgtttgttgaaacttgaaagttctgaacttttagaaagcccttttattatgcactgtactctgtacaacacgttttgcttgacttcagcataaactgttgactgcgctccaggtgcacaacattcacgaaacatttactccaaatagtctcggtcttctggagctaggtttatttattagccaatgacgagcctagggaacttgatctcagagactctagtactctatcattaaccacaaaatatcagcagctctgtcgtctgaaccaagaaaggttaagatcatactgtgcggtgccgaccggcctgctgagcgcgtttgtttcgcatggagggacatatgtaagatcaactttttgattctgtttgtgggattctgagaagcaattggtgacaatctggaaaagctagggttactagcttctagttcatctcgattctatatttacaaattctcataatctaggtaagaatatagactgcatgtttggaggacctgaagattctaggagatgttgcggctgaacttccctaaacaggtcctttgtgaggagaccagtgcaggaaatagatccaacatatgtaattggtaacgaaaaccaccttcagcaaagggcatgcacattgcaaactcatgttttgattcactcatgcctccatattttgtaatcctatatatacaacatcacaggcttgatgcttgatgggctaagtaaatcggagagatctgacgctacatacttctgaccagtgatcacactatcaacagcgaactgttttctctcgatatatgcctccaaaatttggccaatttatgtgaaaaggccgaacatgctatcgatttggcatttttgcaactggctacctgttgtgaacagctggtgctgtgtgtgcaactgggtagtccatggctgctagggtttccgcggtgtacgcagtggtcgccggctttgatcctacttgctctctgttagtctcagctcctagcaccgaacgctctcgcgcaaccgacctcacctacattatttttgcagaaggggattaagaagagggccagatacccagtttgctatggggattaagaagggagcttgctatgtgtatatgtgagatctcagactgaaatgcttgcatatatacataccttggttccttcaaaccgtttattcagagagccagaagaactccctgcaaatcacacgaccacttgctatgaaacaatactaccaggaatgatcaatcaaatttgagatcgagggaaaaagagatgggagtatataagattagcatgttccattcgagctatatatcaaaattaactccctgtagccaagctatagctagcactcagtctgtcagtttgcaaatgagtgtttgtagataattttactagctagtagctagtgaggctcacagcgggggagggctctcatcaaaacatgcacacgtacgtgcattatgtgttctagtgctagctaggaggcacagctagaaaaacatacaggctagataggattatactagacagattactagacaatcagagggatggatagcattgacattatatcatgtcatcagttatggcacggagtatgggttttaggttgagcataatccaggtgaattccctgatcatcctcgtgcttccgatgacgaagcagctgttgcgaaaccctaacagcgggtccagtatttcgaactccacctgatgatgccgccaattccatcttcgcattcagcgtcacctccttgcccactgattgatcgatcggctgcttgctcccaacaacatcgtctccagccacatcctgcgtgatacagagaaaaaaaaatcaggaatgagaaaaaatagttccataacaatgatcatatatctgctgtgaccttgggaaccagggaagacttcttgctcgagtacttgtcactgatacggaggtgatcgtgacgagcttcacatgagatgatacagagagtgaagaggaagacgatgaacaggagaatggtggtgctggtgttgagctttagcttcccattgagagtttgcggagagctttggctaggcatggagcagatagcagtagtggttcactcaagtggatatatatacaagaagctagagaacatggaagggtctggatatatgatatgatcgaaatagatagaagtgagaaaggcttgcactgtactgctcggagctcacccaatgcttcgaggggtttgctagaactgagggaggaagggaccatgtgtgataggtttacattggagcaatatatacaactgcagaacgacatcggggtatgttcagaatagtttcttcatatgacaagttgtaagacaaatgcacctttgtttttttttttggcattaacagctctgtttctggaatgggttacaataacttttgaccattttctccactgttttagcagctgaaatttgtgattggaaagggatataatattagaattattgcatcatataagagggtcaatgtgtaaatcttactagagaaaatccaaaatgccattgacaaattctccatgttaagaaaagctattgacgaatgtaacttttaggaaataccatcatatgagtcataccattgttatcagattccatccattactctccattaaccctatcgcatttttcaaatgggctaacagagtagagttaacggatggaatcctgatggtgatgatatttttgagataagttgactcgtatgatgatatattctggaagttgaattcgttgataacatttcttagaatgaagtccttgtcaatgctttgctaatattatttttctagaggtaaaatatcttagcagatcgggtttaaattaaatgctttgtgacttagtaattccactatacaacgtgcagaaaatcacagtaatgcagaagtactaacagtacgtattaaactaagcattcatgtcacgcgtaacagagataaaatcttataggtgaaggaagaatggggcatgcatgcatgccatgtactattggttatgaagagaaccgaggcagagtcatctcctcgaccgcacatgaatgtctcgatccgtcccctttcttgaggctgttatacaagtacagatacgtgaattttgtaggcaagccgtggttaattcccagaacatctcttgatcatgtgcattgcaattattacacgcagtgcgatccactgttctagttgttgctagctactcctagctagcatggagctggtccatatatatcacctaaactgataaactaagcacagtttacatcctcgatgtaaccaagttggcatacttaagccgtactactttactgttgtttgttattttgttggttccagtgttgccatcgctggctagttaaaccgtaacgttgacatgtctgaactagtattttagtagaacgccacagacagacccccagcctttgacatttctgaattactcctcctcaggtacaatgtactcaactgtacaccggcttcactggctacgtatatatggatcgatgttaaacagtcaaaggcatggtgaacagctgaacaacgattgtgttgcaaagtgggcgtgcaggttaatgtcaggtacagtagtcaggtgtgtgtggaagctggagctgacaaacgcgcgcggctagacgcaaggagacaagcgaagcagtcagagcagcggtgcacgcggtgcgcgcgtggatctgggaacgggaggcacggctggcttcggtggtgtggccttggcgaggcaaaacgcatggcgccccggccgcgcgggggcgggggggcgtgggagaaaatgccgggaaaaggacggcaattgcacgagggggttgagagagagacggatcgagatcgcgcttgcctcgccgtgtcggccggccgcgcgcctcccgctcgttccccggtacgcgcgcgtacgtacacgactacgtgtgcgcgtggctgcgtgctgtgtctacgtactcctgccacgcgctcctcgccgcgtttcggtaccgtgaacccgcgttcgcgtagcgcggtatactagttggtagctagcgccgccgtggcgcgtcgcgcgcgttgctccgtcacgttgtctcacaatcgcgctcgagcgagcacgtacgtacgcgacgagccgtgcgctgctccaactcccaacttcccaaggcatagctttgcctttacgcattccggtacgggtaggtgtaagatctggttcgttaacaaacacgcgaggatctagcagcaaactgatgataagaatgtaggagtaagatacggtagcgggtcatatcacaacgtactagtaatatacccggtgtaactctatttgtctttaataatttttaaaattttcatgttagcaaaaaaatattactatatgaactatacatttgagctttaattcaatttacttcgtacatcaaatatatttaacataaagtataataatatgatataccaattgatgcagatatataatgcatatatatgtgccccatgtcataatgcataataatattatattaaagatatatgataatgcgcatatctgtgtcttaagtcataatgcataataatatgatatataatgcatatatccgtgacacgcaaaataatttacaatggcgttgatatcaatatttattcatctcacaagcgtcatttctgtatgtggtgtgcgtgtgtgtatatatctgcgtcattataatgcatcaccagtgggtgatattttttttatataatatagtgcattttcatattataattatttttctattacatgcccatgctaatgctatgggatgacatttgataactcaaattgaaaaagatataacatcatagtgacttgtgctccttcctgtggggtgcacttcttttttaggctttgccaaaatctttgtcgtttttctcgacacccctcttgataatgcaacataaagttgcccatgcgagaatacaggctctggaagatagataccgacattcgggatggtttgtccctgtgatttattaattgtcattgcgaaacttagacgtattggaaattgctttctcttaaacttgaaagaaagggaaatatcatctgaaggagacagagagatccttggtatgaacaccctttttcgtgcatgatgtccaccaacgatttcagcatcaattgcattgtcttggaatgccctgatcattaatcttgttccattgcataatccattgttaggatcaaggttgcggaggagaatagcatggtagttgaccttaactttcagctcatgtggagagaggccatttagagttatcgtgttaagaaagtccaaagggtagttattttgggaatcatcatcaacagaatcaaagctatggtaaatcttttcctcgccaagaaacctgtcgatcatcttcctgttcagcttatccacgaaatcattttctgttgagagaatggcccgtgtgctcatatattccgcggaggttgtatatctctcatcattgagtgaggggaacacatattcacatattcaatcagtgcgttcactgaatcttcaatgtctgcataaccaatgacaatttcatcaggctgacggacataatcatcttcgatcgtattttccgtcccgttaacaccgctaatatcagcatgatatgactcgtattgacctcggttcattgattaattgcagttgggtctataaaatttcgctgagttttcacattgaacatgtggggacctatactaacatataaccttgtggtcaccattgtacaagaagagacaagacactgcatgcatttaaaaacacacacaaattagctcatgtaaagatgaaacatttacacagtatcattcactgtacactaattctatcttactataaagttatcccccactaactccttaagcttaacatgcaaagatgccacattatcatccactaacaagatggtacatcatcatccactaacaatcatcacatttaaacatcaagcaaacatgctatatctttatagtttttataatttaagagcttttcaaatacaaacatgttaaattattatccaacataattcacataatgttccaatgtatatctttattatgttttatgatatcctataaacttatatagctcatcctcacttagttagtgcttaaatgattaatctatggttcgaattatatttttcagtttttcctctaattaagtcatatcatatcaattgtttttagaatttagatgattaatctacggtccaaactatctccctacttttcttcttccataaagtcataccaccttactttttacgtttgaatcaccattctgcatactatttaaatttaaattatcataaagcacattaatttacttaatctgatgttatttagctatcttacacgttatttttttattgttatcatactaaattctcgcaacaatgcgtggggtttcacctagtaaattaaataactgtaccctatagcaaaggaacaaagtggttaaacttgggttcatggagaatttcctttaatcaattggaagaaaattaacactctttgtggccgcaatgttcatattttatagcaaaataaattttcatattaattccaagtgtgattgaacccaaattcccaaaaaggacttctgtagcataactgttcataagaggtacggtgtttcctataacctgacacaaagatcaaattaaaatacacttagaaaaaggatcaacacaaacatgaataatgtgagcaaggttgatattttcattttacctttctctttgcatataagatcacaaaagcttcaaccatgcagaagtggcttttttaaatcgcaaaacattacacatgagttaattgatatgacatctaccatgttaattcacacacaccgcacgtgtattgttatatccaaggactttcgtgtttttctagaggaaagtacttttgtattttaatgaaagctaggcttgaatatatgcttttggcattatatgaatttatgttcatacttttcattcagtaagccattttcctgctgcattgtgccccgtactgttcagtttttagatatatccattaattgtatatgagagacaactaaaggaatcagtatatatatatatatatatatatatatatatatatatatatatatatttgtgcacgctgcattgctagtggtcataataaaccataaaccatgataaagaccataatgaatacttgcaatggttggcggtagaaaatagtactgattcataaagcataacttcagcactataggtttcaatagaggctgatttatatcacggaataaatcaattggcagagtaaaaacctttgttttttaaggagtaaaaatattggtaaactgcttttaccttcaattcaggtcatgaaccgaggacatggactggaaacagcaggatatgcgcacaggaggtttccaatcagcggggtcacgcacagtggtctgctgaacatctgaagaatctgctaagacatctattttcagttttttactcagagggtagagaataataatctacaaaatgtctgctattgtgattaaccttgcaccaattaaatcatatcctacttagatagctcacaaattctactcgcttagccgctgcatctcaaaactaacatatagcattgcaagaaaataggagcacgtccagctatttagttgtgagcaggaattctcattgtgtaacactatatgacaatatatctgaaaatcgaaatttggttgagtttgcccaagtgtgcgattatctggacaaaaggggggaacagggatcaaaggagtggagcaggcagcgaactgggatcaaacctgagtggagcactgggtgtggatggagcttgtagttatcaaatcaatccggtagggcatgagggtctctaccgttggtggagagggatccggtagggccgaaggtgggatcgtcgccgatgaacggtgggggggaagggaagggaaggggcgacggcggggtgaggagtttcatcggcggtggggggaaaggaaagggcgacggcggggtgaggagattcgtcggcggcgacatgctggagatggggcagtgcgagagaaagaggcggggagagggatgtgcgtgtgggatgaggatggagaggagacgcagatctgtaaggcgagaaagagagggggggagtgcgcaattcagggaggtggaggtgggattgatcttgatccttcgattttacactatacgatctgaaccgttgagtgataaatgtaatagtgtaggagtgaaagatgagtaaaacgagaaagagagggggggagtgcgcaattcagggaggtggaggtgggattgatcttgatccttcgattttacactatacgatctgaaccgttgagtgataaatgtaatagtgtaggagtgaaagatgagtaaaatgagttggtgcattatagggtagatttgaggagtagtagtagggtagtactagtagagtacatgttgccaaaaggagatgttcacatacgctccaaactgggctagttattgggccgaaagctacaagtaacaaggcctttctgatcgtgccgcccgacgatgaggcccgacgtaagcgccgtagctcgagagtcaggaggcccttgttggggctgaaaatccaatcatccgagtcgcgtcgcatcatctacgaatttccctcttcttttttcagccgtataaaaaaaaaagctggtggaacaatacacgccggagtataccggaccggtgcaacaacgttcaccacacaaaggaaaaacaaaagaatctcggtccgtggcgcacacgcgcggcgatgcaaacaaagctccgcatcccgtccgtccgttcggcgttcgccatcaggtcggcgcaacccgaagagataacgcccccgccgtacgctgttgccgtcagaacagctgatataatatgtagaaaaggcgtacgaaatgacaccattgccccccgtcttcactgatggccttctttaacagacacggagagggacggagggagccgagcaagcaaacgtcggagccggaggggaaggataagaaaacgctcctcatggccatggggggaccaccggacaaaagggtggtgagcaaaccttggagagctcattccagcttttcatcattattgccaaaaggtttaggggcactgtccctgatctataaatgggaaagaaacaatccggagataatttcttgagactaaatatgtggttgaaagggggcaataacacctttatacatttggttaaagacatgtgactggctatgtgagcctgtagaaggtgctccaattacgtggcttggttttctgataatttgttttattcaagtgagaatagtatatgcatggatcatggagtagatggtactcaatttatttcagaagataagtgtcacacgactgaatttaatcaacggtgtagtggaaacatgtaaaattatcattggataaaaataaacatctaaaatttattcgtgatgacatggataattctcataattcaatttttttatccgatagtagtttttaggtctgcactacgtatttcctttttttaaaaggacaggtgattctactgaaatttctcacatgggtatttttgtcaattgcagtagcaatgtgcaatgataacacagatttgtttgggaccaatgagctttaaaaaaattctttctttttgcactgtccctttctttctttcggggcctttggcgagtattaattactcgtatttccttttggaccttccggcccaggtctcgagcctggtcgcagtcacagcgtcactgttcaaaagactgtaaaaagtgagcaaggtgactgatgagggtaaataaacggtgcaggattccctgcccctgcagctcaaacggtgccaggggctctcttcaaatgcaacgtcctatctaggtgattgttagtttctaacttttttttcaaaattctaatttttttttgtcacatcaaaacttttctacacacataagcttctaacttttttttctttaaatttctaattttaatcaaacttttaattttgatgttgaactaaacacagcctaagatgactggcccaatactaataggaaagattaataaaatgcttgccatacattcgagaaaattgtcacgagcaaccaaaggttttgtttggcttgactaattgtattgtaacatttgtttccatttgactgtgtcaaacctttttcctttattctttaccaacttgaacatggattgtactcgtcctgtggccaattctttacgcctcttttgaaacatgggtttgtcgactaatttcgtaggattacagctgtatatatacttttttttctatttggctcattgaaattaaagattacagttttttcggagcctatcttaatgttgactcatgatagaatgcttagctcggtgtcgtccacggggtgacttccctgaggcaaggttgtcagtattcaattcgtatcctagtatcttacgatattacgatcctaccaagccaaaacgatatcgatcctatctagtatcttaattttcatagtatctcgatcctactattcattactacacaatcctacgaaatcttaggtgatatcccgattctacatgtctacgatactacgaaatcttattttaaataacatggtttgaaaataatgtaattaaatatgctcaaaattatataaaaatcagctaaatatattaaaaccaacgtggtttctcttgataaatgtctctatttgcatgatatatatcattactatattttttatacagaatggctatatataattaatataaatattaattaaactttaaaaagaaaatcacatagtatccggatactacgatacgatattactttgagaaaaacgatactaactagtatccttatcctgacgtgaggtcaacacgtggtaatgctcaggggacgaccatagctataagcacttgggcatccggtcactgcccatcacgtggcgagttctcgcgcgagctaaacacgtaggagagcctacgagtccccggcaggagatcacgcgagtaccacatcttggtatatgtgagcgtgcagagtatatatagaaatacaatttatagaaaatttggaattaaaaaaagaaatattaaaagacgagtctagagtccatatagaaatatatataatttacaaataactaaaatttgatattaaaaataattaataactaacacgtatataaaatacaatatgaatattacacatttgtagtttcgtaaagttattgcaaaatttaaaattatgatgtcattttaatatatttaaataatataatgagaaaacacatatgccactttctctgtttcacaatgtaaactttttagaattgctcatatttatttatgtagacccccgattttggaaatcggaaatcttctgtgtttatccgtaccaatccctggatcagtagttggtacacatatacatagttggatcacaacatatcacgaatgaatttaggctaaaagagttaaatacttacattagggctaggtaggccaacaactatcagagaacaacagcggaagacaaaataatataagggcccggttaacatgccacaggcagtcgactggggaacgagacctagaacaagaccgcactccgatcatcttgtgggatacgcaagcgtaccgacaagggcttctcttcaatactctcctaaaagatatataaatagcaagggtgagtaccaaccgtactcagcaagccaccacaacaacaatgcatatgatagagggtattcaaggaatggtttcaggttcttttgcataaagctgcattttgcaaatattttcacaagcctaagacctatcatagactgatcaaattttagttccagtgttcacattaaacaacgacggttatgtccaccatccattgtgatcccaaggatagcttcccgccattgagtcgtcatggttttctgaggacgtccaccttccctcttctcaggaagtggctccatcagtataaaaatcaccatgcaatatcccatcccacacaagttaagaatttagagtctagccaagtgtaatacatgtcccggtgctcattaaccgcgagcacagctattcgaatagatttagtttactcacactgcagtggatgtacactttacccgcactccgcgactgcccaacacatgagcctcgtcccaacacatgagacgcgtcacgacaaagcttttcgataacctcgcattggcagtacccgctccatgaacttaaatcctcatgcactctaggcgtccatgtttctagcagtgtgagaagttctggcgctcccgggaaagagaagtctcacacatattaaattatagttcaagttaagttctctctctcacacactcatggcagttctaccaatggtgacaccgatgtagggcacgcctctcggccctacctcaacggctgtcccaccgtagcgcacctgcctcactcaggggtgaaccatctatgcagggatactgcctcctctcggctatctaatccgctaggtctatacccatacgagaagtgcggttgtacgggggtcgtttcatgcttaacttcatggctcggtccttaattgaccggggacggtactaaccttttccagataccacccaaatcctccgtccgccccagtcgaaaacggttgtttaattttatttctcctttcacaaatcatgtcatcaacatcatggcaatgtggcgctcatgtctctacatgccgcatctcaattaccttcccaaaggtaattgcccaagcatatagcatttgataaatatgagtatgcatgattctagaatagcatttctaagcaattgtcatagttgactagggactcatacgtaaacatggttacaaagatttaagggtaaacaataatcaaagcatggtataatcacaagtaggatgttcatcattgcatgtaattttatttgtaaacaaaacaatttcgcaattgggatcaacatgttcaaggaatagtgatgacttgccttgctcaggataatccttattattgatataatcttgatcaaccttcacctcctggaagttgcagacgttgcctcacgactaaccgatacacaaggtctataatacgcgagaaaaaccaatattcaaacaacaatcaaatatgcgcaacaaaatgtactattcgtgtttgctaatggatcccaatcatgctaaggctaaagtttcttaatttttctattgtcatcgtggcctatttaggagttaaccaacatagcatttatgggatacatatatatttggctaatcggtggtttagtctatcaaatggctatagaaggattatggctatgtatgcatctatctaaataggacggttatatactagaggttctgttgttagatggatttaggatcaatcaaacaattacagtgaattatttgtattattattttattgatggaaactttactttaattatgaacatattttacttgccattataaattataaaagggctaataattatccatgctctatatgttaaattcgggaagtttataatattatagttacagattatctcttaatgaacaatccggagttacaattgaactatgatcatatgaggtcaagatttataattagtacttatctactattcatgtttgttatatactccctagtttaatatatgaaaaagataaattaattgtataactataatgggatgtacaatatgtgtgcaacaacgtataaggttttggtcgcctactgtacatgagcttatttagaaagtgtactacccaaatgctccaagtgattcctgaatataatgtagtttaattatacattagctagtttctatgagtgatattgtatatgtgatgcgacaagtttaagcactggttctattgggttactaataagtggtaatcaatttaggcatatatatgctattctatatggtattgcatcgattaatttacttagtgattcctccacatctagctctgttattattctcctaaacaggttaaagattcatctatgtgtgtttatattttagttacataatcataaggctatacttgatttaaataacctataagccatggatttaattatatggccatcgaatattaaataagtactagtattttcctatacatccattcatttgagacatcacataaaattagtttgtgtggttgttacagtggcaagacatgttagagacaaatattattacatccactctactgtacaatactaattttatttattagcatatttttaagttgactattatgcatcatcttgatattaattatttaatatttataaatatattttatcaaatagtgagttatatatcattggaaagcttatgaatttagatgaatttaggttcaagtttcactcaaatcggagctgaaatgagtaagttatgctagtgtaaagattcaaatttgaattaattctaataattgagaaatggtactgttcctaattcatttatttataatacaaccttatccacaagctatagtgactgacaggtggggtcaaggtcttgattttcttttctacagaattatttttctaagggaaattggatggaattaatgacaggtggggcccactctaacctctctcctccattctcttttctctctctcctctctgttttctcctctctctctcacggcctcggctagaaccggcgggcggcacgacgcgacggcaagcggtgggggagggggaggctcaccagttcggcggcggggtcgacggagacgcggcggcgaggtcgacggcggagcacggtgcggcgacgaggcacatcgcggcggcggggcgcgtcggctcagcggcggcggcggcggcttccaacgaggcggcaacgccggggatgggaaagagagggaaaagggaggagaggtggtgggggtagtgtggggagcaatgggcagccggggaggggcttatataggcgcggggaggggtggccggctttaaatgacgacgggacggcgcggcggcgtggggctcggggcgacggcgggacggcgcggcgcaacggcgacagtgcgcggcgcgggcggggctcgaggcgctgatggcgacggcggtgacgcgaaggcgtggtagcatcacggggctcggggcgcggcagcggctcagggcgacggcgatgggacggccgcgcggcggggcgcaggtgcgaggcagcgagaggacgggcgtgcggcggctcggggtgcgaggccgacggcgacggctcgcggcgcatggcgatggcgacgcgatggcggcgacgggagtggcgcggggctcggcgcggcgcagccgacggtgacaggcgatcatgacgatgcgacggcgatgacgacggcgcgcggcgcggtgatgatggcgacgtgacggcgacggcgcgcggcggcgatagcggcgcgcggggcgcgaggcggcgcgacggcgcgcggcggcagcggcagagcgaggcgacggcgacggcgacggcggcgcggggcgcgaggcggcacgcagcagtgggcggcagcggcgcggcgcggcgcgtgcaggggcacggggcgcgagggggagcgcggcagtggaggggggaagaagggctagggaaccacatcaaacacctaggccataatgaacagtgattttttcctaattatccacttttgaggcctatttcctattaaaacttgtcccataatttctagatttcacacaattagagttttgcccaatatatgttttattttagatgaaagttgaccaaaatttaatattacccatattttatatattttcctattgtattatttaaatgaggtttaaatctaaaattaacctagataattttggaggctttgagggttctaaaattaatttaaaatatcctaatgtggccattattattacaatagcacattgaatgaacttatttgtataacaatgcattttacgtgggtctactcattctataaatataaattgagacttagtacaacattaatctaattgtttaattaaacactcacatattcttatttatgtataaagcctaatttatttatatgaccattattttatatgagtgattttcatgctatgaggagcttgataaggtgtttcaaatattaattatatattctagtgagatactctattatagatggggccattgatgtgatcatcatttcatgtgtacttatatttcatgtgagattggattcaagtgaattatattcaactatgttgtttccttttgttaaatatgaaatcaggctatcaacatggtttgattatttaatatttgatttgtgatttataccacagggtttaataattgacttgtactttatttggcctggctttcatgtgcataaatatttatgggattgataataaatatcgtatcgttgtaaatcgtaactattgctcgggtgtaaatctttagattgatttttttccattgcgtcgatttatggtttggcaagcaataacaaccataacttccagcatgatgcaaaaagtttaaaaagttcgaaattttagtgatttttaatgtcaggaattttcaggatgttacaatttagaagttaatgagattcattaagatatgagcaattctaaaaagtcttgcaatcttaaacggagggagtattgtatgagagaaaatacaatgatgttagccgtgcaatctgctcgggccaccatgctagtttctaataaatatatcaaaaaagtaagtactgacatatatttataaagctgtaatggcacgacttgaatttagcgaattgtaattatatattttaaacacatgagaaattataattgcatgacccaattaaccctttaatttttacaacttaatcctataataaataatttagtttgttttgttgtcttcttcggtctttacttttagcccactaaaaaagtaaaattataaaagtcttccccctttgaaacgtggaatttcttataaggcaaaaacgaaaacaatacatgtttggagtgccctaacacctcaaattctatggattataaaaacataggaaaagataaccatttgaatagtacgcggaaagacacatgaattagacaagaagatagacacaaaatatattttttaagaggttgagctatgttttttctcatgttagaatttttttaaaattcgcacgttttgagccccaaaggaatttcatatgatttttttataaccattcctatgattcaaatgaccgcataagaaattttgtacaagactaaattcctctaaaatttgttaaaaaatcttttattccaaaagaaccctgaaagtatttcatcgttgattcggtcgcgtgtctatactagtagcttgtaagctgaggcagtaaaaattaccttcgccgcagatcatcaagaaagtactaacaacaacgccgtttaccagaagaattgactgaagtcctccaatctaaccaccgtaccaaccatgaaccactgtacaaccagaacataatgtacttgccgagtgtaaaccaccaaaacagccgtcaaagtccgaaaggttttttttttgcagtcaatgtatctgcattgaccgactagtctcactataagtctacagtaattttactagcagtactacaataaactcgcgtttttattttctgcagactgcagcagagaggagaaatacgagcagataaaacataactaggggcgtaaaaaagacgacgctacgctacagtacagagccgagattgaaaacgatagagggagagagagggggagggaccccccccttctttttaaaccttttttatgttgcacgcatccagggagaggattggcagtggagagagagagagagagagagagagagagagagagagaggtgtccatagcaagcagagcaggagcagagccaactgcacaaggcaaggcagggggcctctcctcgctgttctactgctgctatactctggcatcgcgtcgcgcgcgcaagcaaaagggtagttcctcaatcaaacgctccaagagaaatcaccccgccacgccacgccgcgccgggctgggctgctgctcccagatctcgccgagcggggcgctcgattatgtgggattaggtagatgagggcggcgctgttcggtgccgagaggagcggggtagtggaccacggcggcggcgataaggaggagctgttttggccggcggggaagggggggctggtggtggtggagccgaggtcggtgctggactgcacgcgcagcccgagcccgccgtattccacgtcgacgctgtcgtcgtccctgggcggcggctcggcggactcgaccggtgtggcggcggtttcggagagcagcaccgccgccgccggagccaccaaatggggagccccaggcgagcatggtggcggcgggaaggaggagtggggcggcgggtgcgagttgcccccgatacctggagcactggatgtggggctcgtcgggggcgagggctgggacgccacggccacgctcggcaacgcagccgggccggaccagtcgttcttgaactggatcattggggccgccggcgacctggagcagcctggtccgccgcttccagtgctccagcagccgcttattgacaatgcggggttcgggatcccggccgtggacaccatgggcttctctctggatcaccccctcagcggcgtcgcctccgacctctcgtcctccggtgcgcacactgccaccggcggtggcggcaaggcctcattagggttcggtctcttctcgccggaggccacctccctcgagcagccgccgccttcgatgctgtttcacgaaggtatcgacacgaagccccctcttctgggtgcgcagccgcaatttctcctgaaccactaccaaccccagccacccaaccccgccgcagccttgttcatgcctctcccgcccttccccgagcacaatcaccagtcgccgcatctccagccaccgctcaaacgccaccacgccattccagatgacctctacctcgcccgtaaccagcagcagtcatccgcggtggcgccaggtctcgcctattcaccaccgctacatggcccggctccgttccagctccatccttcgccgccaccgattcgcggggcaatgaagtcgacggcggcggaggcggcgcagcagcagctgctggacgagttggcagcggcggcaaaggcaaccgaggctggcaattccgttggcgcgcgagagatattggcgcggctcaatcaacagcttccccaacttgggaagcccttcctccgctccgcctcctacctcaaggaggccctcctcctcgcactcgccgacagccaccatggctcctccggcgtcacctcgccgctcgacgttgccctcaagcttgcagcatacaagtctttctctgacctgtcacctgtgctccagttcactaactttaccgcaacacaggcgcttcttgatgagattggtggcatggcaacttcctgcatccatgtcattgactttgatctcggtgttggtggtcagtgggcttccttcttgcaggagcttgcccaccgccggggagctggaggtatggccttgccgttgttgaagctcacggctttcatgtcgactgcttctcaccatccactggagctgcaccttacccaggataacctctctcagtttgccgcagagctcagaattcctttcgaattcaatgccgtcagtcttgatgcattcaatcctgcggaactcatttcttcctctggtgatgaagttgttgctgttagcctccctgttggctgctctgctcgtgcaccaccgctgccagcgattcttcggttggtgaaacagctttgtcctaaggttgtcgtggctattgatcatggaggtgatcgtgcagaccttccattctcgcagcatttcctgaattgtttccagtcctgtgtgttcctccttgactcgcttgatgctgctggtattgatgctgattctgcctgcaagatcgagaggttcctaattcaaccaagagttgaggatgcagtgattgggcggcacaaggcgcagaaagctatagcatggaggagcgtttttgcagcaactgggtttaagcccgttcagctcagcaacctcgccgaggcacaggcagactgcctcctgaagcgggtgcaggtccgaggattccatgtggagaaacgcggagctgctcttacgctctactggcagcgtggggagcttgtatccatatcatcttggcggtgctgatcagccataagcttcactccaccaaggttccaccaccgtttgcaagcatcgaccactccagtaatgtccatttattcttgcaattaaatgttgcaaatgaaattgttgtcttgagctgttgaactcttcatattgcttttcgttgcagcttattagctagcctagtggatttaggaatattggtgtcagtctctatagctaatgatgttgctttaggttgttgccatgctctgctcaattagccatgatcatctcattggaaacactgcttatgagtagagactagagggtaatttaacctatcaaatggttgtgtggtacagaattaatattatactgctgttgctctgtaattctttgggtacgttagttctgcatttccattgttatgcattgaactgaaatggatgcacaatgcataccattctaatagttagtggggatggctatcataggactaagacatattgatataactacatatgacttagtacagcaataaaaggttttgccaaacagctcaaatatatttggagtaataggtcataatcaagtttcagaaagcgaaacaaagataataaatttccacgtcattctctcctttttagtttgtgtaagctgtgcttagtaatttttgcagattagaatatgatatgcagagcaactaccggtgtcgtagttgattttgcatagcaattgtgtatctatcgatctgcacaagctcctgattgaaattctctcaagtaagtttgtctaaactggatcaaaccttagtttataacccccttgactgaccatcaacggtacaagaatgccaaacgatgtttctttccacaacaaacaacaaaataaatttattttgtatctctactctagaaatggatagccaatgtgtaaaaatatattgcccgtaacatgagaacttcacgcttcacagtccattcagttatatttccacaatagacgtaattccaggataacatgacgagggcgaaactaaaaatgcttattgtaacttccatgttatgtcctgtgacgaggacacgaggtatgcatatattcccattggcgagatggtacataaatcaatccttgtaaacttgtcaccttggttttagaccgtattccatttcgggagaggcctagttttcttggtgatatgttgtaaacttgtcggtgttggtaatttgccggatttgctccatgtgtatcccacatctactttgactccatttcactgcattactggacactgtaattgtcatcgtctgagttgtttcactctacagtggagacatttctaggctatttttttatgcatatctactgcttcaataatgcacatacatacacctgcacatacatacacctctacccgtgctatcatgtgattgtgtcctatacctcggattagaaaatgtgaagggctattctattaacgactggagagttgattaaatttactacagaactgggaaagacccggacaagaacactggctactatcagggcttatttcatctttgctcatctcccacatggacgtgtcccctcctgcatgatcgcctgcccctgcatttccttccatccatttacaaaaactaatcacctggagtctcaattataaaactagttttttatgatttgaaatttctgaaactccgaattaattaatagagttgtactcgatctagattctcaaatattatgttatacgatttaacaaattctgaattaatgaacataaagttataccccctttgaagtcttgggtatagtgtttttatgatttaacaataccggaattcaggattaatatacattaataaatattgtgttgtaagggcagtttcaaccctccacttaggataggatggtgtttatagcattaactacattgtcatgtaggacttttaacttatgtggcactatattaattaagagagaaatgaagagatgaagaaactgggtcttatgcaagacacagctttaacacgagaacctatgcactagacactatcaagttttgcattaggagagaataatgtcttcataatagatgaagaataaatatgattggtagagaagagaaatgatatatttattaatggtccactttaagaaaccatgggttgtggagtgtagtttctattgtggtgtcttgttgacatggcaccatagacactacttatggatactgtgggttgggactgccctaaggcctcgattagtattttttataatctaataattttgaaattccaatagttgaaattaacaaacaccgagttatgcttagtttagaatctcgataataatatctctatgatcgcataattctgaaatcaaaattaataaatattagtactagttaaaattgattgtttaaaatgtatagcacgtgcaggtgcactacttgcataattgatggctagttaaagggaacgtattttatgcgcttaagtttttcgtgtacatatcatgtatactagctaacaaatttcaaaaaaaaaatctaaaataaaattatacaggtacttttattagtattacttatgtgtcaagttttacctttaaatttattatatttagcctaaagaaaaggataaaattcctgacaatttcaagagtataaatcggttcgaattttatctttttttcaatcatatataaaataaatttgaaaatgagactttacacataaatgtactactaaaagtacatgtacaattttttctcgtaatttttctagaagtttgttatgtgtgcacaatgcggatacgagaaaacttatatgcatggaatgcgtttactaattaaaaagtaacaacaatgcgagtgtaaaatataggggtataccgagaactggcctggtcgaagacgatttgtggcttgatcctagcctgatccaccatgtttgtctggccaaggaccttgtttgcttgccatacggagatcctctgctgctcacctggaacgatccatctttgcctcgcaaattgcaattagcctgggcttcaaggcggcagcgacgattttatgattaccacggtaatcttaatctcgtagtacgccacaaaccgccgccgctgaatcccgtttggccggatcctgccatgacttgtcactcagatcccacaacctacacgaagccactcccgtaggtctccttcccaaatccttgacggatccgcgaagccatccgccgcgcaaagctctcgccatggcctgccggctcaccggatctcgccgtcgccgcggttttgcgcgaagaagccggagaggcacagaagtcgatggcggcttgtccaatctttccgcccacattgctgtagcctgaagcctgaagccgtaattccgtaaagcagttgatcggaagcgatagaaagcggtaaatgtgtttttggcgaagcttctgcggaataaaacttgcaggattttcagcggaattttttacatcgacatagattttggaagtacaattagattctatgagtctgtttggcacagctccaactccagcccagctaaacaatttcagctccacctgatagggagcgtagctgggtggagcgctctcacgaaataaactaggaaggtggagcagggtttaggaagctccataactccactccagactaaactcttagagctaaatttagaaattggagctgtatcaaacatggcctatatgcaattattattttcactatcaaaatacccgtgatgaagagatttttcattgtaaaggttatcacttattgcaagttgcaacatacaaatatattttgtttgtataatatatatttagagtttatgccttaaaaaaatgaattttagcggtttgcctaatgaaaagctgtaatggacggggaaatgtggatatccatccatctacaaccattgacattcaagtagtcttaaactcgaatttcaatgtctaacatcccctctccccctctcctcaaccaataaagaaaaagcacgccctcatctttcaattgttcacctcacatctcagaaagttcgagccaccggcccacctttcaaaccaccgatgacatgacatcctggctctctcctctcccgcgtcactgctgctcatcctcacataccttagacacgcctacgcccctccctcccacacaccatcgctattgacatcgcagggcaagatctccagttcagcttgaatcgattgtcctgtctctagctactagcttaggtgcatcatccccactcacgcgcctcgagattcaggaactttggcctggtttagttggtgaaatgaaaatttttgagtgtcacatcggacgtttgaccggatgtcggaaggggtttttggacacaaatgaaaaaactaatttcataactcgcctgaaaaccgcaagacggatcttttgagcctaattaatccgtcattagcatatgtgggttattgtagcacttatggctaatcatggactaattaggctcaaaagattcgtctcgcgatttacatgcaaactgtgcaattagtttttctttttatctatatttaatgcttcatatatgtgtccaaagattcgatgtgatgtttttaggaaaaaatttttggaactaaacaaggcctctatagaaatatggagaggaaactagttgtattgggatatcgagtgttgaatataaagagtctactggagcgtgcagaaatatagaaatggtatgttaaggagaatcactcatatggatggaagaaaagcttgttgactctaaatttgatccaacactcgaatgcctgagagatttacttgactctagtgtagatcctaaatttcaggttcaaagcataccttagttgactctaaatttgatctaacactcgaaggcctgagagatttatttgactctagtgtagattctaaatttcaggttcaaagcatactggaatttaggatatacactagagtcgagtaaatctctcaggccttcgagtgttggatcaaatttatagtcaactaggttgatcctgtatgttttgatcagtaaagaaagatacttcgattgtttatacgttatataagcttagccgatgatagcacatttctttatcaaaagcaatcttactatatcggacttaacggagataatataaaattgaagttgataagaggatatttaactactgagtatacacaattaataacaaaattttacttaattaactacaatctaatagatcagattcaacccagtacaagattgatagcaataggtagatctaattaagccgatagattctatacaaagtaatggatatataagtcaagctaagatagcaaaacaatcaaagaaaaagcggatatatgggaagacggtgtttgtaataaattgattagaatgtcggaccgaagcgagagtcataactaggtcgatacaaacaaagttgatgaaacttaccttctcgctgaaaattgtgacgatgtatcctgctcgaataactaagaactcgctaaaaagggtggtgatgtgtcagaaattgtatattgactagcaaaagtgtccgtgcgcgtgcgttgcaccgggtgataacggagtgtgtatattgaccaaaagtgttgtttggtttagcaaaagtgcccgtgtgttgcaacgggaagcgtacatatcagaaaaatatacaattaattaaaatacaaatttgctaaaatatttggtatttttaagtaggtatatgtgtataattaaataaatttacaagtaaagcaagtgtgagaaataactataattgtaatgcttctaaaaaaatgagcactaaaaatgaacttactctcttttttttcggcccgaggaacctaaaatagacttatttccggcccttgccagtcggcccacggccttttgcgcatgcgcgggctcacttcccctccccaggccgcaacctgggcttgggccggaaaagtggcctcactctcgatccctcttgggctgatttcagcccggatgacaccggccgtccgatctctagggttttgatcggacggccgagcttcgatatcggggaaacaaaaccccctcactcccagccgccgaaaccctagcccatttccctcccctccctcccatctcacttcgttgccctcccctccgtgcccccgagcggcagcggcacccctcctcccgtgagcggcggcgacccgcggcggcgccctccccccgagcaacgtcggcggcggcgccctcccccccagcagaggcggcgccctccccccgcgagcggcgatgacgtctcctccaccaccggcgtcgcggccgcgtcctcccccaccaccggcagcgcggcggcattctcccccaccaccggcggcgcccggggaggcgatcctctctctcaaagcgacggcggcgcccctcctcctctccctctcgggtcggcggcggcgggttggtggcggccgcggcggatccgagggtgggggcggcggcggcggcggctccctccaccccctctagcctccctcccgcggtagatccggcggcggctgcgtctcccttctcccctctcgcctccctcctgccccagatccggcggcgatggcggtgtcggcggcgtcggcggtggcggcggccgcgggccggcagtggcttcctcctcccctctcacctccctcccgccctagatccggcagcgatagatccgacggcggtgtcggcgtcggcggcggtgcccccaccacccacggcggcgtcggcggcaccctcccccaccaccggcggaggatctagcgggaggggaggcaccccgtgagcgacggcgacggcgcccctcctcccgtgagcggcggcggccctctcccccaccaccggagagcgccctccgccgccgctgccggcggatctagcgggagggaccggcggaggcggcgctctcccctccaccagatccagcaggaggggagccgctggcggccagccgtccctgtggcggtgacagcgacggcggtggttcggcaacgacggcggcggcggcggcgacccccttgatctaatttttggttttgatttggatatatatgtgtacatgtatcatgatttgtgtgattgaactccgattgtgatttttttccggggtttgattgcatacggattgggatttttttttggagggggggggggcgacgaagcgggacgaaaaaccggtgtgacgaccggaaaaatccgaatatttatattacttatatatttgttgataatttacaaggcttgtgtgcacttatatttatgcccctaacctaactgagtttgattcgaatacaattcaatcgactaaaaacttatctcctaaaaagaaatgtaaatctaaaaaacctgcctaaacgtaagtacacgacatataatttcaaaagtaaatctaatactatcttaaacaacctgatacacttttcaacaaaaccaactcaattgatggcgtcaattacttccattgacccgtgttttaccaaagactatgtcaaattttaccgttaacagtttggtttggactcgtattaattggctctcaagctgagcccaagcctccttcatatacagccctagctgtgggtgtagagagaggagaggatgaagggatctgctagcacatggtggtagtgtggatggtgccggtagccgacttagatgaaactctcgccatctcatggtgtctcaacataacaccgcgggcaccgctttagccactactctcctcatctcccttccctcttctccttggctccacactcactccctcctgccgccgccgccgccacgctgcgccgttggccggtggcatgatgtgcgtgaaaatccaacctcatatagcatttagtctatacgatcggatgctgttgtataagtatgtgataaaataggcggtatatttaaggataaatttaaaatactattttagtaaaaagtaaattttaaatagtaaaattattttttggtcatgttctttttataggggtggaaaatacgagcagataaaacatatagtagggcgttaaaaagacgacgctaggagcagagccgattgaaaacgatacagggagagagagtgacacttttaaaccttttttatgttgcacgcatccagggaggatggcagcggagagagaagagtccaccacacagaggagaggagaggagagagagaccgtagcaagaggagtagtagtagaggagagcagagagccgaggacttggccaggagagagaaggggtagggggagaccgggagagaggttgcagcagaggcagagccaactgcacaaggcaaggggcacgcagccacgcagtgctcctgcttgccctgcccctgcccacccccacctcctcgctgttctactgctgctctactctggctggcaacgcatcgcgtcgcgcgcccaagcaaaggctccatcaaacacacaccaagaaagaagaagaaaaaaaaatcccccgccacgccgggctgctccagatctctcagccgcgcgcgcgattatgtgggattaggtagatgagggcggcgctgttcggtgccgagaggagcggggtagtggacctcggcggcatcggcggcggtaacagggggctgttttggccggcggggaaggggggcctggtggtggtggagccgaggtcggtgctggactgcacgcgcagcccgagcccgcgcaattccacctcgacgctgtcgtcgtcccagggcggcggcggggcggactcgaccggtgtggcggcggtttcggagagcagcgccgccgccgccgaagccaccaaatggggagcccccggggaacacgggggcggcggtggcggcggtggcggcggtgggaaggaggactggagcagcggctgtgagttgcccccgataccggggaccctggatgtggggctcgtcggaggagagggctgggacaccatgctcggcaacgccgccgccgccgcagccgggcaggatcagtcgttcttgaactggatcattggggccgccggcgacctggagcagcccgggccgccgcttcttgacaatgcgggattcgggatcccggccgtcgacccgctgggcttctctctggaccactccctcagcggcgtcgcctccgacctgtcgtcctccggtgcgcacaccgcaaccggcggcgcgggtggcggcaaggcttccctaggattcggtctcttctcgccggaagccacctctctcgagcagccgccgccgccgatgctgttccacgaaggtatcgacacgaagccccctcttctgggcgcgcagccgccgggcctcctcaaccactatcaccaccagccgccgaatcccgccgcaaccttcttcatgcctcacccatccttccccgaacacaatcaccagtcgccactcctccagccaccgcccaaacgccaccactccatgcctgatgacatctacctcgcccgtaaccagctaccgcctgcggcggcggcggcgcagggtctcccgttttcaccactacatgcctcggttccgttccagctccagccttcgccgccaccgattcgcggggcgatgaagacgacggctgcggaggccgcgcagcagcagttgctggacgaactggcagcggcggcaaaggcaaccgaggctggcaattccgtcggcgcgcgcgagatattggcgcggctcaatcaacagctcccccctcttgggaagcccttcctccgctccgcctcctacctcagggaggccctcctcctcgcactcgctgacagccaccatggcgtctccagcgtcaccacgccgctcgacgttgccctcaagctcgcggcctacaagtcgttctccgacctgtcgcccgtgctgcagtttgcaaacttcacggcaactcaggcacttcttgatgaaattggtggcaccgcaacttcctgcatacatgtcattgacttcgatctcggtgttggcggtcagtgggcttccttcttgcaggagcttgcgcaccgccgtgctgctggaggtgtgaccttgccattgttgaagctaacagctttcgtgtcgactgcttcccaccatccattggagctgcaccttacccaggataacctttctcagtttgccgcagaccttggaattccttttgagttcaatgccgtcagtcttgatgcattcaatcctggggagcttatttcttcaactggtgatgaagttgtggctgttagcctccctgttggttgctccgctcgtgcaccaccgctgccagcaatccttcgtttggtgaagcagcttagtccgaagattgtggtggctattgaccatggagctgatcgtgcagacctttcattctcgcagcacttcctgaattgtttccagtcttgcgtgttcctccttgactcacttgatgctgctggtattgatgctgattctgcctgcaagattgagaggtttctgattcagcctagagttcatgatatggtgcttggacggcacaaggtacacaaagcaatagcatggaggagtgtttttgcagcagctgggtttaagcctgttccacccagcaaccttgccgaggcacaggcagactgcctcctgaagcgagtgcaggtccgaggattccatgtggagaagtgcggagctgctctcacgctctactggcagcgtggtgagcttgtctccatatcatcatggcggtgctgatcagccataagcttcaccccaccaatgttccaccagcgcttgcaagcattgtcaactccagtaatgtgcattttgttttgcaattaaatgttgcaacggaaattgttgtctcaagttgttgaacacctcatattgcttttcatcacagcttattagctaggcctagtggatttagcaatatcggtgtcaatctctgtagttaatgatgctgctttaggttcttaccatgctctgctctattagccattatcatcaaattcaagacactgctgatgagtagagaggataatttgacctatcaaatggttctgtggtacagaattgatatttgcttgctgttgctgtgttaattgtgcatttctgttgttatgcttatggattgaactgaaatggatgcatttctgtatttcaattttgcaatggtagaaatcattcaaggcaatgggaatggctataataggagtaaaccatatggatatattgtacataagatttactacagctatatagccttttggcaaacagcaaaggtttccgggtatatttgaattcgtaatcaggtttcagaagagaaagaaagatattttttggaatttataatatgatgtgttaaggagccaatggtgtcaccatcgtttatctggccacctgtagctccaaattttcaaagtttagtttgtctatttctggatgaaacgttttctcaacaacccttgactgaccatcaactgtacaagagtgccgatgatgtttctttccgcaacaaacaacaaaaagaatattgagtatcctcactctcctggaatggatagccatattggcgcttcatttgctaatgtgcccaacacatagagcaagtaacatgataaattcacgcttcacagtccattcagttatatttccacaatagacttaatgccagtataacatgacgagtgcaaaactacaaatgcttattgtaacttctaggttatgtcctgtgacgaggtatgcatatattcccattggcgagatggtacataaatcaatgcttcggttgtcaacttgtcatcctgggtttagatcgttttgcatttcgggagagtcctagttttcttggtgatgtgttttttcatgattgtgccttgtcggtgtctgttttcttgaccaactgcccatccaaatgtgccggatgttgctccatgcatattccaaggaggccatcgcttcccttatccatggaataagcgaaacggtatatttgtaaacgaaaaataatttgtaaataaaacttttatatacgtgttcttagcgacctaaaagcaaaggctaaaaaataaactacaatgaaaaaacatcaaaatcagctccaaatttaaggttgaaaattcaaatattggtttataagtataagcacaagccgaaagatgagaccgcaaatattcttttgctccgttttccattactggtcactttaattgtcatcgtctattttttacactcatatgcattttgaaaaaaaaaaaaattctgtacgatttgtatcctattcagcccattgaaacaagagattaattcctactaattcctttaaaataataaattcttatagaataactatcctgaaggaaaataagcatgaataatgagcatgttttcccttttcctacatcttgctcctatgaaagttcttgtatttcaaaatccgatagtaatgctatgagcatgccatttggggttatactggctcctttagaacacaccattggagcacacataaataggaaaaatgcagaaatagaatgttactccctccgtcttaaaatataagaacttagaaccggatgagacatttcctagtactacgaatctggatagaaaatgtcttatccgatcttaggtttttatatttggaatggagggagtatgtgttattgaatcctgcagagatgaaatctacatgagtctgcaaaatattttgtttggtaaccccataggaagaacataggacctctacacaagcaagagagaatatgaggtgtgatgatctcaatatgtttgttttcttctaaaaattccatgaaacaacccattctatatgaattttgaaggtatcttcagagctattccttcagaacaaggatcatataggattttttttccctggggattcatgttgtagggcacttttgaatcgtgcgaatgaaaaaaaaatagaggaataggaaaaacgtagaattctaataggaatacaagtacaaaatagatgattgcaaaacataacaaaaacacaggaatgaccgattgattgaaccataggaaaaatgcatgaatcagatgagagagatagactcaaaggaaagtttccaagaggttggagctcttgctaaattttctccacaatctctataagattgtctgttccattggaattttagatgataagatatgattcaatcatttgttttaaagggtttcataggaaattttcctataggattgaaatcatccaaaattcctatgtttttcctctaaatcgaaggggctcatattcttctaagggctccgttgaaacgcgggattcagaagacacgtgaataggaaaaacatagaaatagaaagtcatgtctttttgaatattacagaaaattgattcagacatgaatttgtaacagataacatgttataaaaccggcctcaaaatcacatcggaaaccaaacgcggaagaaacaccataggagatccaaacacggtgacgacaccgagacacgatatttgataacggagttcaaccgaagcctatatctccagggcactgattacgggcacttctccctaatctagcatattacagcatatcagagttacaacgactcacggccggtcaccgccggcagccgctgcctctcgctatgctaaattatcatgtggttacaatatgcacgcccctctatttatgagagatcctaggatagagtccgactcttactttagtcttaatatattttaccactccaagttctaaactgtaaccgactacatacacatattcgacacaaactctaacataccatttgtcaacaccaaaacaaaaccatagaaactgcaagtcttgcaagtctccaggaagagaaaacatgaggctagacctcacgttgacttttctccaaaattcctatgaaatgggagatttcacaaaaatttcaaaggattttgtggaggccaattctttggaacagaggacctagtaggataaatttccatccgattttaatcctctatttttcctttattccaaagcagccctcagattctagattttcgtctgcacgttttctaagctattaaacaatatgtttcgtgtaaaagttttctactttctattagttaattcatacgtttatacactccaataattatataaaaatcagattatccatcaatatatcaattttagctctctcggataggacatgtcaatcataaaaattcctttagttttcgttcgttctaaaggagcccttcatttttactttttctttagcaattaattttatgttttttgaattcctttgttttataatagtcccacgttgcaaaggagtcctgttcactccccgtagagacatgtctagcctaatttttttactcatctactgcttgaacacatataaaaacatctctaccagtgccatcatgtgattgtcctacctcggattagaaaatgcgaagagctattctattcgcgactgaagggttgattaaattgactacaaaaatcggaaagacctggacaagaacactggcccctattttttctagggcttatttcatctttgctcatctcccacatggccgtgtcccctcatgcctcctgtttcacattcttgcccccatgatcgcctgcccctgcatttgcttccatccacttacaaaaaccaatcatctgtactacaaattgtactagctggagaagctggtttttctcgaagcatgcgtacaaatctatgatttgaaggatttaaaacaccatgttactggtgtgacatcagggttagtactccacagtctctcacttttttcccctgtgccagttaggatcctctacatcaagaaaaaaactttatcagagggttattatgctaatcaagattcagtaattcaggatgagattttttactgttcatcggaagctgaaacagcactcaaattgtaaattttgttcgggaggtctgacacttgctaaacacagggacgaggaacagagtaacttttgaattaacccggagaggtagagaggttaaccggtcaatcggtgtctattcacacgggtgaaatgttgttacagcagggactatctagatggtatttgacagaaaaacacctaaaaattatgcgaattctataccgttggatcgctttaagattagtgctggcagttctaaccctacctccccttgtcattctaggcccaccgccgccttctctcgcgcgcactgtgcctctgccgccaccaccccacgtgccgtcgcccggactcgctagttggccgaaaggagtcaacggcgccagcgagccctcctcctcccctcccctaccctaccccctaccccctaccccctctcttcctcaatggatcgcgcgagtgcccccgccccaccgtcttccccgtcttcggcggctccctgcctccggatccgccaccactagccgccacctcctaaccactaaccgccggatccactgtctcttagccatttgcccccgccgccgacgccggcccaccgccctcctccatccccgcggcttcggcgccgccgccggcgcctcgccgtccgcccgtgtcaccgcccaccgtcgggctaggcctcccacggccatccctctaagcccagcgacacccccccctcttcccctccccccacctctcctcttacctccatcccaacccgggaccctaaacactaattccattgctttcgtcggggtcgtcggagttagagaagatgttgccggagctgtaggagaagagctaaggtcgtcagagcacgaatcgcgaagcaaatcccaaaatcagtaatctgcatgattttggcttcaaaaatcattcgccagccatttagccctttccctaaaaaaattggtcatcctatcctatctatcactcactctgattttgatagcacaacgaattataatgtgttgcaatgcaagtagaggatcaggagagagcccccgttcctgcatgagaacgtgcacttgatcatgaagctgacagctccatttgtttatccaaggagtgacgacaagctacacatttgtttatgtcgccatgcacccctattgcccccctcctctacccttcgctccaagtgtttcaagctagctacagcgtgcgcgatgcatgcatacgccactctggacctgggactccgggagagagggctaaaccacgctaaagtcggtgctgctttttcttaatccaaggagttaagcagtgcccatccattcttttgaagccatctactgtgctgcaatttttttttgttaggacttgcagctttcaatccaatatagagtactcctacattggtttctttgcttctgtagagagacaagctgcccggctcccctcacaagtcacaacagtgtattgttggtgaagaaaaggatgcctcggatcagggcagctgaattggggggggggggggaggggggctatgctttgtaggagtagtacttaccccttaattaatcatgtcagttaggccgcctggccagtctgatttcattcagagaaggtccaaatcaatcacaaatcaacacaaaggcaaccgctaacctaccccataaacaactaccgcctacttctatttgcaacatggcgaattatttccaaggtaggtttggtttgttttgctttgaattctacatgaatttcgccagaatgtatagtactagtactagtagtatactgcagagaaaccacgatgtttccgtggagcacagtgagcgacaagacgtgcggttaatctcggcgtgccatgggcagacttggcctttcgtcgcacggatgtagcagcagcagtggtgatgtcgcgggagaaaaaccacggccgggggccggcccccatacgggacatgtggagtggaggaggagcacccgaggacacggcctcgtgacagcgtcgttcaattggactggtgacgagtgagcggtcgtcgtcgaggagaggacggccactggccacggcgcgcgtcgtgcgtgcgtgcgagcgaaactccgtcgaccgagtagcagagagagagggggcacggtggcatggcgtccacatctacagatatagcgccgtggattgtgtttcactactccggcatcagttgatagcgagcaggcagagggcgggcgcggtaaaacttccgcgggcgaggtgggggcaccgacccggacacgggaccacgcctccccacacacacacgctaggcaacgtgcgaccaaccgtgcgcgcgcgcgcgcgggcgggggcatggcatgattgtgatctctctctgatcacgtcgcgcggctcgtcccgtgtcatatctcgtctcgtgggatttcgggcttgtccttagccggcgaaacagttggattggacggaacgggcggcgcggcagccggctacagcgaccgccaggccaacccccgcgcgcggctggggcgggggcgggcgcgcgcggatgctgctgcgaccgtgaccgcctcgttatctcctcggcgcaggctgggtctgctgggggtgtgggggctcacaccggggcttttggcaaaagaggccgcctttgctttcgcctttggatggacgttccaaaagatggcgatcgagatcaaatcttgtgggggcaaaaggagggggatgagcctcctcatcggccgatccgatttggtgatcagcctgcctgccttggccccctccctggccatgcttctcccaacgagtacgcgcgcgctgctgttaggtatgcaaagccttttcctatcgttcttttttttttctataaaaaaactattaacactgtgctgtgctctctctggctcttcagtgtccacgcgacgtgttccatattgccatatgcccatattggccagttcttattttttcccccttgaagacgggacaattgtgcttttcctggcttgggggcaatacgtttatgcgcctctagaggagtaagatcatggaaaagcacacgagattgtttccttgtatgcaagggaaggtacgtaacgtgacccactgtgacaaacagaaaacccttgttgtgaaggaatgtcgtgtgttagtcgagcatccacaaacgatcaaatgcatcgattactattctctaaagaaaactgtcattatctaagagagcactagcaattatatatgctgttgtctgaaagcgtacagtcccggaagaaactgaacagggtacgcctccgaaaacgttatctgaaaatctatccttgacccgagatgactctcagctggttttcaggtttcagcagctaacgacaagggcttgcacagttgcgggggatgtgtagtgtactctagctcattaatgagatgtcaggtaagaaaagtagtcctccaaatcgcatcgacggcgacaaatgccctcgaataatagacatcacccgcagaccggctcatttggccatttgggatgcccacaaatggtaaacattccaacgcccgtattactacctaacacaaagtacagattcagagaaaatatggacagattttgtgcacactcgtgcagtctctgtccgttccctctcgtggcaagcggtgtaaacttaccaaactgcacaatagcaactgcactggatctcaatcctatagagaggagattttgccaataaacagaggaaagcctggaagctttcctggacacttatgtcactagctgcatgctttgctgcaattcaaagatgctgtattgtcagcaatcagagctggctggattttctgtcacgtgataatttgtctgcaaataattgatcattgctctcctctctctagtctatattggcacacatctgcaagcaatcaagaaagagagactactcttcaggttcacgacaactacttgcacattttattcaactactgcaccgtcgctttgcattacacagaaatggaaacgggaaagatctgacgagctgctaaacactattgaatcgcaaaaccacaaagcgaggtcgctatggatagacaaaaagatgcaaaagattagccctaaaagcaccgtgattaagcagtcggtctgatgaatgcctgcgtgaaatgggtttcagtacttgctggaaagcaaccgacgcacattgcagagtattgctgtctggtccaaacagagcgtacaaagcaaacggagcgtaagttgcaccctcttaatcttaacaaagctcacatgggtggtagtataataccctggcaatctaacttgttcctgacattacagtacctcacctttcctacactaaagtgactaactatgtcgagagaaaacttccaaacaattcagtagcaattgattagttggacgacagaatcaaatgaatgagaggaacaagctatcatcagatcttttcctcagatacgccgagctgagcttagttgagatgaaagctggaagaagccaagaaaagaccaccagggtttaaggcctgaatcatgaggaggaggacgaagaataatacacaccctgtcctaatgcaaaagagcttccttgtccttatcaagcaaggctgcaagtctttgctaatcttctcatccgatcgaaaagaaagcaagctaggggagaagagattgtagtagtagtagtagtaaagtggatgcatgggggtgatagaaaaggagccatgcattgtaccaccaacaagcaagtgccgttgcatcgatctgcagccttttgatggaccggccggggaaggaagcagaaaaaaagatagccgtcgattaaaacagtctgtattgcaccagcgatcgatgcgtatgggtgtggtacgtactacgtagatagctaagctaggtcgtctctcgatcgtcatctccctggccctccactgctcgcaaagtcttgtaataatgcacagccttttcggttgctaaagggaagagggaaaagagagacagagaagacagaagtgatcagattgtttttcttttagcgaaaagtgatcatgctatgtacaagtgagatgatgatgatgatgatgataacggtggtctttctttctctcttcatgcacaagggccggcggtctgaattcaaaccccatgggggtacatatccttttaaacttaaaaggcgtaaaagaaaaataaaggagaaaggatatgccataaacagaactcagacagcagccatgaaaatgcatgtcttcatcagtgattagtgagaaaaggagggagcggatgaatgacaacttgtttaattctccctctgaataaagatctacttacgttgtgatacaggcagaaagatggcatacgcaactctctgtctagtgtgcacctgcagggctaatctaaccggcgtgggtgagcgcgtagggcaaacgcttcctctccctttcgacgaaatcttttacgtgctgcccgccctcaaaagaatgcactcaatttcatgcttgtcgaaaagccctgccttctcgagtgagagcgatacgtgtgatcgagcccctagcttctctctgtgaggaaacgcttgtgcagcagcagctagcaagacacctctgcaatcccaattttctgtcaatcactcgcgccttccgtgtggtcctcttgtcaatctctgtgtgcgtgtggactacttgcttggccacttgtggccaagtagaaacgcacggaaaggaagctctggaactcatcaattcgaccaccggaattatatttgctcgtcgatctgtactcccagctagcttccagcggcaaaatctcacacatgcacagaacagtaaattagtgacagatcgatctcagcgagtaggtagaagaactgtattagataggattttcctagctagttgagttaactagctttttttttaaaaaaaaaaatatcagaactgcattaggcaacacgcaccaagatgaaggttaatagagaggtcaactacgactccatccaaacaaagaaaagctcgtagctttcatgcatggcccacgcagttgtggccgtgcggcaccacacgtacagcgacgacgaaactaaagaccgtcgagtgagtgctcgtcgctgttgctggctagctagctgtactacccgctggccgcgatcacggttattttcgccctgcttttctcgcgggtcaatgctctaactcatctggatgtaataggcgtatagctcagctatagcttattagccagccaaatcgatgatatactgaaatgatcgatcgatcggatccatctgcgaaaagccatttgctagtaatacggtagcccacgtgttgggggcaaggagagatcactagctttcggctactcgctctcgctagctctctcctcttcccggtcgatgattcgcgtttcgctttcggtcgtctcaccatcgatccatccggccgcgacctgcctcagctacagctttttaatttccgttgtgcggtacgcatgggctcgggataatctcaggctcgcttgcgcggcgaggagaggccagcgtacgtacggcgtggcgttgcgcgctggccgatccgtaaatggatcggccccgcgctattcaccactagctagcagtttgtgttacacggaatggcgatggatagaaagagagggggtggggtgaggaggtgaggtcgacgtgaaggctcaagcgcgatcgagatcatgaattggtcttttgctgcgtgtgggaggtgtgtccatcatgcaagtggagctgtcgattacatgtattgtgtggttgttttttttgttcttgtatgtataggattggatttatgtatatgcacggagagagatcatttatgggtgtggagacaaagcagagattttgaaggcagcatgcaggaagtggtgtagatcgatcggattgtattgaaaacgttcggggcgtcggtgtacacaagtgtggttcatgcaatttgacactagaaagtagtagtagatcagatggtctctacttggaatgtagtagtactagtaactatagagttctttcgtaaagggcatcccctgtgcatgatattgcaggggaatatattcggaacatccgtcagtgtgaagactgttcgttacttatagtatcccctcctccttttgttctcctccccgcgttagccaacttgactacctgcgaaaaagaattgtggtatggctgtatattacttaacccgtaagtctaccgaatatttcatttctgagactggaaaagttttgcacaaagatcgtgtgtcgtgtctaaaagatgtggctggaaggtttggtgagagacgatgtgtctacttggaaatccaactagtaacgcagcccgcaacacggccctctcggcttaacccatctgcgcgatgccaagcccaggcgatgcgttggctcccagtgggctgttggctaacgccgcaacgtgtatgcatcagcttagcacgacaacctcgatagaataagtccattttagctcccttaactagtgacataatctgattcgtatccctaaatcacaatagcggatatctcgacccccgaactattggaaccggtgcaatttgactatctcgatagttttgaaagatggtttcgctaatgtggtggtgttgacctaatcttcgctaaggaaaaaaaaactataatgataacaaaatacgtatagtatcatctacgattctgaggaaacagacgcgttgatattcatttttgttctggaatccttctatttaccattcttgggagcacgattaacttcttattcttattagataatattttgtacagagacgcaagcggcacagcgtccttatcggcacgctgtttcgcacacctgccacgactaatacaaacacttatactgctgctaaatccctgaaccgtatagcaccaagatgggtcagaatcttgtttatggtatatggcaggttcactttcaccacgcagaactaggatggcgactggcgaggtaggcgtacactgttgcagagctgctgttgtagtcaggttgtgaaattgcggacctccaaacaaccgtatcaattggtcgcgtaccaacgcgaccaaagtctagcaatgtcccattctcctttttttttcttctttgctgtacagaattccgatttcaagccaattccccgtccacctacacacctttttgcggcaaaaacaggtcgattagagcttccttgggtaaaatagcgcgaatccaccatagcaagctcacgactcgagaaccccgttgccttcctgcagcatccgatcccctatcttcgagctcaactgcagcattaaggaaacatcaggtaaacatgtcactattctgtgcgccagcagtgaacttgttaaaaaggcctcggagatagacactgatgatgtataaacagtaaaagactacaagcgtcaatcaggacctgaagatagtagctagatgaggaactgggtcacttacagcaggatatgtgaagactatgagctgcttgtcagctgtcgaaacaagaagattagtgttatctttctgtaacgcaattgctgtaacgttctgtccttccccaagttttagcatatgaattatctggcagtatatcccttattggttagaattctggtcatagcaaacaaagataaaaaataagttaaaaagttgctcatggttttcacctcaagtttgtatagatcaatgaagcagaccgagggcacatgaacagagggcttagtctcatttaattctggcaaatcatcatcaccgttgggtttgtcaagctcataatcatctatagcactaaaaccatcacgattgcaactgttggacaagcatgttccgatcaaagcaaacttgccatccacagaaatctcaatgcaactaactcgaccagagaaaggtgtcagaaccgaggtaccaatcgggattccattaacagtgaatgtcgataatcttttctctgattcattccaaatcaatatgattccttcagaagataaacacattaaatgtgcctcctgtttatccagcttcctaatgagcctgcctgtcctcaaattatgtagaaggacaccagacgtacttgaagaggaagcaacaagtcccaaggcagaactaacagaacagcaagttacttctccaagatgccctcttagtacatgcataggaccttcaattcgtcgcctcctgctggtttctagaactttgcttgaattgctagtgctgctatcaccagaggctgaatcatttggtgttgttggtgtagatggtggaggttctggagtacttttcttacgtaaagagcctatctgacgtatcctccaaagtattactgtggtgtcacgagaacctgtgacaagataattgctatctggagataaagcgacgcaggtcacaggagcaagatgcccaaatgccgtttcaatggtccttgctccgtctggggatatcaacttcacagaattatctgcatgcccccctacagttagaagggaaaaaaggatatcagaaacagcagagggagcagtttgatgatagttcatagtgtaaatacagttcaaaaaaggaaaaagaatgctgctgtaaaagcagaataaaaaaacaacattttctacatgaattaatgaagatgtcagttactcgtatgatctcactttgaacaccaggttttcaaccagaaaaagatctaggagggctttcaatacaaataaaacatggaaaatgaataatagaaaaaaaatactagctttccaacaatataattgagggggaaaatgaagaataaaataattaccagttataacctctctctcacatgtgacaacaacaaccgatgaattttggattgcagaggcagcaaaagcaatagcccttgggaactgatagtcgtctacagaaccagcagatcctttgaagatacgcattattgcaccaccacttaaatttatggcatttcttccatgatgaaagaggaaaggtgtccctgggccatttgaagtatttggctgccaatggtgcagtgccaaatgtgctgcaggaacatttgcacctacgactacaatagagtcatcggatacaagcattgcactagcaggaacattgcagttttctggattaggtagtacataagatctgacttcagttgggttccagaatattgtctgcacagaaaaacgaagagataccatgcactcacttcaaacaaatctaaatcatgaattagcgaaatgaaagctaacaggtacaatagatttcatctgatgtaagtgaaccatggtgcccataggatcactttaaccccagtaccccactgctccccatcctctccgacattcaaccatcgactgaggactaacaagtgaaatgaggcagcttgactttcttttagaactgtagactttgcaatacatgttggtatatctcctagaggcaaacatggagatggttgtgtccctatgattacgatgtctataaactcttcaataacgccttacttttcccttgaatatgctatgccattttaactcagcaagtatgtagcttactcgtgaacctctgtattgcttgatgatggctattctaaattgcttaatctgtattctaaaagttcacaggccaccgtgcttaccaaatagtgacatttcattttgtaaaacacagaaggataacttgaaaacctacctgcagctttaagatgtctgccaatggccttctctttgtatgtgggattgtcagcaattgagatggtgtttgtccaaaattacatatttgatcttgcatggatcgccgttgcaccttcagcattttcagcagcacgttaacaactagctagctactggcaaaatctaaaagttgaatgcagaatacttactggattagtgatttgatcaatatccaccatcccctcatatgtagcatagggaaaaacattgttagccatcactgcatctttacctctttgtttatgtctgaacgagaaatagttgatgactaaaggatgttaacatagagattaataaaatataattttaatacaactagcagaacccgtactttgttacgggattaaaagaaaaatcaaatgcagtggaaaaaatatattgcttttctttgtaatttttaattaaatatggagtatatgagtattaattagatgtgcatgctgcaaaaaataatcactgtgacttcatcgtgggttgtgaccattgtttattttaatcattctcatccactccaaagacccaagtccatcttgctacagtggaaaaagaaaagctcagtttatctacctacagttgaaaggcagctatctgacagctaacccaagtctactctctatctctcagctctcacagcaggaggcaagttcgaatgtttcactgataaataggggcccatgcgtcggttataggagtggtggtggtagattcactgccaccaccactaccaacattttaatgtagtatagatatagatcctctagggcaacaaaattaggacacaagataatatattaaaatatacagtttctgtcagcaaaaatatcaatgaatatgtatcgtcatcagcagataccatcacaagaaattttacattgtccatctatgtcaactaaacatcccctaacagtctcagcagatagtagtctttctatttccagcacaaaaatttactgacatgggtcagttttgggaagaaagataacacaagagggttgaacaagtggtcaaaggatggggcaggacatcgatgtcactggccaacatatatgggacgaatagtagataattaagtaaaataacgcaatgcagctaagaggtggcaacaaaaaggaacagcacatagataacgtacccaaatattaggtctatccattcatgcaaatgagcggagacataatcactctcaagagccttcctgtgtttacatatgaaatcaacagggttctcagcccaaggaggcaattgcacagaggctgcaatacaactcaacattagaggagttcagctccattcccttatgcatacagaatgaaacaaacttacatagctttccagtaagttgagttgaccctaagtcaaccgaattcacattcgtaaataactcaggaaggtaaaacatctctggaacctagagaaataatcacatgattaggttccaccaaagattctgattggacttactcactaaggaatcacaatgaattgaaggcacatttttgaacaaaacttactaactcttttacatcattcatgtcttcaaggacactattccatgttttgttgatacaagaaaacatgtgatcatcttgaccaaacctgccaccttgctgctgaatagaaagggctgtaaaaggctctatcctgacaagataatataagacctgcagtagatgcttatgtcaacaaccaatagcacagaaatcggggtatttgaaaaaaaaacaaatatgtaaagtcacactaatcaactacaggaggaattgtcatcgatgaacagtatagaaccgattaatcaaatgggatgacttaataaattaatctaactccaaataaaaggaacacatgcaagcaaaatgctgactcaaaacatgcacaagagaaaaggtaccgtgccaggacaggagtaatgtgaactgtagtgaaattttgggatggttggatcattgaaactagagtaatgttcctggaatttcttcagtcgtgcaggattcagagcgccaattggctgcattgaaatttttcaagcatcactaccagtggttattgaaaaaggtatcatccacagagttaatgaatagaaaagaagaaaaaaaacaaaagaggtctaaactggcagcaaggaatgaggtacaggatctacctccgaaagatctcggtatgcggacggatcttcaagatccagtgttttggagtggtaatctgctaatacccatggaaaaacagggtactgcataaatagctagtgatcatttaaatgcagtagtatatttattatattcagaaaatgagttatgaagcaaacatgcctgtgcaatgtcattgtaactgcgcccagcaagagtgttcagttccatcaggtattcaaagttgctaatctgcacaatgagatggctctacttaagtgttgaatacacttaacatgctgggctgaaaaaagtggtttattgcattgatacctcccatctagcccagcgctctgtcaattgcgactttttaaggattttctcaggtctctaaaacaaaagtacaattgattaaaactttcagtaagaaacagattttaacattaaagtttgcagaactgcactgaacaccaacctgggtagctaggaaaatgctgttcaaataaggaggtttggtatgaacgattgcccgataagcatgtttacatgcttctgtatcctgataaaaatcatatacatcttcaaaatattcaggtagctgtagtgtgcatatgattccaacaacgtaaactagagtatcatcaaggatgtacctcaaaatcgaagaagaaatttgacctatctaccatgaatagctctaaagcacttcgccgtaacaaatatctgcacagttaatttaaatcagtatgacatgcaagtactataaatggttactgctaactcagtagtccataattatatgataaggacacagatgataaaagcaaaaaagttatattagttaacactaacgactgcaacaagaagttcaatgtacaccaccatactggataatgaagaaccatttaccttctactataaattttatgaagtgaagatatgaaccagctccgatctttatcttgctgatcgtattgcccactagtagatgcagcatcatccatgtaactatcgctatcactcatatgctcatcaattataaagttaatcatctttgatgtgacctgaggaaaatcattatatactagggcttaatatatctttcgcatattacattggagatgaagcagaatactaccataaatgaatagaaatacaagaaaacaacttataatgtaaaaagaaagtgatatgacaaacataactagttatgttcatcagagaattgagattgattaaaatccagttaagaccaagatatacagcaaaaatattaactttactaaaacagaaaggaatcatgaatgtgtagacatgattattgtaacttcagtttacaactaatatgtcataatcatgaccaagaagtaatggcattaattagaatttgaaaacacccttatgcatgaaaaactacaaaagtgaaagtacgtacattagaaaccacttacttggaaggttccccgcacaaccttgaatggacgcaccatcaatgaaggcagttcaacaataattctctcattatttttgctagaactgtaacacggtgcaaccacggtcgatcgaaccaagttgtgaacactagaaaagtcagaacttgttgaatcatctacactgctatagatagtctcagtttctgtctgtttggcattcccatgtcctccatctactgatattgcgtcagctactataatggaagaatttgttcgaagagcatttgcaaatagagagtctgcatcttccctgtggctataattggattctgcaccatcacatagaagcatgttctcctcataattattggccatactcaaatgttcagaccatttgtagtttcttttcataaatcttctcattcttgatgaagtttctgtggaatctaacttccagaaaatctgtgtagaaaaatagtaaagcaaatcaagatgtctataagaaaagaaggcatgcatagtgtttactgctaagatgttctttttcctcttgttgactgaaacaatttatttgtatcatcataaattggtcatcaaggatagagcttttcataataatgtaaaataaaagaaaattttaggaaaagcaggactgttcgtacgttatcaggagtacacagaagttccccaaaaggtccgtatagcctacttgtctctattaagcaatgaacaagacgtcgccatgcccgaattccaatagatgcacaacgacgattcaaaatatctacctgtgttcgcctctccatctgcatgtccaaaagttgcctcaatggtgtattcacaagttagtaattcctaaatatcagagcagaagcttcccattccatatcaacatacctcaactcgttgcaagttccgtgccaatgcaaaactggaaacaagaagtgcaacatatttgtatgaaagggcagaaaaatcccttcctgatactgactttgaatcagcagattgaagacactccaaccaagcagcacacatagcttcagatgtattccacctctgggccctctcaatatcacctgcagccctcctttgtcctgaagttgccattgctacagcactaagaccccttctcgagccaatcttagcactgcgctcaaggtcacgagcagcagccaaggcagcagcttttgcagctgctttatcctttggtgcagatgttggtaggtttggtgttgcatcaataggcttctgaaaacttgagaaagtgtgtagtttagcagatctacgctctagcaatgaggtgtcacgcctgcgcaacttatttgttggtggtgctattgtttctgtcccagaggtaccagcagcaatcatggccaatgccattgcaaccgggggagaagcaaaggcagcagcccatccaggtgatatcattgagacagcagcctgagttcaaaagacacatacagtaatctcaccatgaacagataacctccagaaaagcatagaactgaagaggtctttctcaatagtaattattgcaaagtagtttatagttatgctaatgatccaaatcgtttaaatatttgacaaaactagctctgaagcattccatgaactactcaagagactagagataaaagaaaggagagatactgggacaagtgactactgtacacagcacacaccacatagtttcacgagcacaaaatggaagtgcctgatgagcaattgttaaaaagaatgaggatttaaggtaattagccaaattcagacactttgcaaacatagcattttaagctggatatgagaggagctcccgtattgattttttttaagaggtggtgaggctcaaaactaggctagctagctcaccaaggtgctagccggtaagactccgggtctttctcctaaccagaacttctactctacgtaaaaccaacattagttgacacaggcatacagcatcagcgcaactgccaggcaatttaagttgatagccattgtgtacgaactgtgaagaatcaattgttacctcaataggtaaagtgtctgctgctaaagcacagtcatcaacaactagtggattttgtccatctgaagatgtgagctcatgaattccagccaaaacagagcgatatcttttcagtacagctacaaatggtggcatgatcaatccaacatattttttccttagtggttttctatcactacttacagcatgccatacctgttaagatagaaacaacttcatgaataatgcataatataatataataaactttcttcgctttatctactaaaaacaaaaaaaaaaaaacagctcatagagttccacaaatttccaagacctaacacagaaaattttacttgagacttctaaaataacagctaaagttgccatatatctttataaggactatggatcataatgaatcataaatacactggatgagcaacagcatttttccttcttaaaatcgacgcaaaaatagttgtcaagtgtagcatctgtttacagcatagttaacctacatggtcatctagacatctagtctagtcttaggttggctcatgcgacacatagctctttgtacatatttttccttgctaatagaacagatatgtagtttagcaccataggtcttttttatgacttcaccacttgcctttatggctaagggcatatcatgtaggccatgatatatttttccttgcaaatggaatagatgtacagtttagcaccataaaaacctatatagcatatgatggcaacaacacatggtataacttttttccttcatggccatatataattaacgatgagaaaatgcaactgcagtttatgtggacttcattgaattattcaacctggattacaccatggtacatgtgtgttgttagatgcagatcataagcttccatggaagtggaacgtgatattacctctgaataaataatagaagatgcaaccaaaaccctctgtctcttagattcagaaacaggcatattcaaaataggaccaagcactctgtacaaaaaacaagaattacatatatgaatgaagataatatggattaaaatatcaatgaagagatgacggagaaacaattagtctggaatataggctgagaccgaccactgagaaagaattgatcatgatgtaacccaaaaacaaagcttaattcacataattaattgtgcaaaaacatacagtaagggaaaaaaatctccaatactcctcgttaggagttcaatgcacatatattttcattaggttctgtatttgatgttcagccacattgagaaaaagaaaagaaaagggaaacatgtggcaaaattgaatgttggactcttgtaccccatttctactttggggcaaattgttcagtaacaccagaagatagcacaggtcggagaatggcatttgtgggcatgtcccctaaggaccagctgtcagactaatgatggacgttagtctctaatttatactccattaaaaaatataaggcgtattttgttttgttaggacaatgctttgattacaaatgttttactaatatattattaatgtgatacaaaagcataatcataagtactccctctgtcccaaagtatagcatacgggtattaacagagggatgaaaagatttggttgcctcctcggtatagatgaggtataggcccagactatttggggctataataaaacaacggggtagtagggatagtatggtaattggtaagtttaatggtaaaagtacaatactaggtttgagcagtagaagttatattttgggatagagggagttaatacttttgaataagaatataataacattaattttgtgttacaaaaaatactccctctgttttttaatgtttgacatcattgacttttgaacatatgtttgtttggccatttgtcttattcaaaaaacttacataattatcatttattttattatgatttgttttattattaaaggtattttaagcatgactaacatttttgcatatttgctcttttttttaataagacgaatagctgaacatatgttcaaaagtcaacagcgtcaaacattaaaaatggtgacagtatatcataatatagtaagtgttgatcaaagtcttgtcctaacgaaataaaatatgccttatattttttaacagagggagtacatatttgcagggttactgagctaagagcctttttttcagaatatgacttgaacaagctattattctaaatcactacacttttctggttatacactatgtacctccacagaagcgcagattgaggtttcctggaaggcgaacaagaattatcatcatgaatcatcatgcttccagtttgacagcctaatccttcagatatgacattcttcatgctaatgtttctcataaaaatgtcatcctccccattgtcatcctctctgattgaagcaagtgtcaaccgaagtatgcaaaagaatggctgatcactatccaacaactgattaagtgcactcatagcatccatgccagccccagatccccctccaatgccaaggccacccccaagttgagaatctagtaaaagtgcctgcagcattgcaatagatttcttcactaatggaagttcaatccagcttccattggagtccttctctagaacagacttccaagattcccaaccacttcctccaccaccaaagatattggatttgggtggaatgcatacaccataccacaatcggcttctgtacttccaaccttctgaaagatctgaaatacaggtcccataggatacaaatgcatgcctaacagatccatatggctccgctgctgctgctgcagtgacacgttccatcacctcagaagaaatttgcccgttcgcatcagccatagaagcaagaacctgatgttttgtacaccaacaataaagatagaattcaaaacgatggtgtgaaaagtagttcaaagcaagttaagttcaggctatgaaatatccttttggattatactcatattgctaccacgaaatagcttatatattcatgcttgtcgagttctaggaaagaatgtagaagaacattcaagacagataatagagataataggtacagtataccaacataaaatggccaaccagctactagctagtagtttacagacatttccttttgtcaagaaattagtgtacacgcatttctttttgtcaagaaattacaaactacaaacagattttcaattctaaaactacgtgtgtacaaagaaaggctgggagacacaaaaaacattgttcatagcaccaactcttcagaaatctcatagcagtatcctttactttcaattttcttcacgagaaatttttcttagaatttggacaatcaggtgtcttctcatacattattctatttatgagtttaacagcattagacaaagacaaaataattaatatagtgaattcataaaaggacctcgaaaaaacaatcaaagttgattcagtcatatgcagcaacattgaaaaaaaaaattgaaaatttcggagctccattatcatgttagtgaacactagattgaaataatgcaaataaaattatgatatatggtcttctagatatacatacatcaacaggaagaccaccagcatcactggacaaagattgccttgagccccctgcatccaaaggttcactaccagtcctgctcaatgaatttgatctagtggcagctgatgaagcccctgaggcaggagatgcagcactatcaattgagcacgataagaaataatgttgactgcgtgacctcaggtgatcttctacgagcatcagaagaacaattgcattctcagccaaggctagagagagatgggtagctttatctgcttggattttagtttccttgggcatcataccctcctctgcaacaccagctgctgcagcattgattccttcagtctgctatggatataaataataaaagaatatcatttgcggactaataaaattaactgaatactttctaccttcatagacacaatatgtgctatgtccctaagaatgaactcatgagtaattgaactggaattttctgcgcaacatcatgaagaactaattctgtttcaagagtgcacaacaaaagtgaagtttggaagacaaaggcaaagggataaattctttatttcactggaaatatcaaatgatggtagtagtgtgaaaatgaattgctactgcggtcacacaatcatgacgtgaaagtgtggtaatacaagcttactatgttcaatctagggacctagttagcggagcaacattaggagtcttgtgattctaagctcttaccagacacctgcttatccctatgcttatttggtaaggctatgctccttcctaaactgaaacttaagtcagggaagatgattttggagttctacaaggttgcaaggaattagaaaccagattaatcatgtatagtttcctgtgctaactccatgagttagctagtttcacttataatcctagtaaagtggtatataaatattaccaagaaaacaaaacagaattattacgatgacttattccccaaatttgctatcactttacacaaactgggagtaaaaagtctaaacagattgatgtggaaaagaaggtagaaagtagcaacaacaaaatatacaagaagaattggctgacgagtatattttgtaagagaagcaacatctacctgaacttgaagctcctgagcagaaaattcaagcagattacccaataatctccttttgaaaatcggtaacgattcctcacgccttaataagaagaaaatgcaaactaatattagcatatcaagattgacatatgttttaagcaccaacattcactatagttcaaaaacacaggggagtatttcgtaatgacatgacaaagctccttcagattctcagaaaaataagagagagatgtaacaaagtgcaaaaggctgcatgctaaaggagaaacttttttagaaaggtagaaacgaatattttgtaaggaatggtttagattatatgaggcaaaaccctgtaagtattcatgctttagcaaccttattgattgtggtggtttatcacctcaaaatttctgttagtgcctagtagatcaaacaatgacaggatgaatggaaaacatgttatggggccaatgcttcttgtttacctaattctttggtccccagtgctagatcctccaaccattgaaagccattctgcacaatgtatcgttgcctctacatcctggaaaaacccagatataatgttaccataaaaagaaaggttacaatcctataaagtaagttaatatcaaatagaaagatatgatatcaaagtcacttgccttccacccatctttctgccgcattgaatgctccaacatgatagctagataattgtatatatggtcttccatcacacttaagcttggaccatctgaacctctgttatcacccatctacatatcaatttttatacattagaagttccagtagtgaatgaacaaaagggggaaaaaacaagaagaagaatacaactgtcacctattaatgtaaccctcactaaaaaatgttttcatttgtcatcacagaaacgttacctcatgatttgaaattaagacctccaaaatccattcgggccattccgcaatggaagtcagtgcaattctattctcattattagtgctggccaaatatagaagatcctgaaataatataagcaataagtaatcaaacaagagattttatgaaagatgatatacgatagtaaaaaagataatacttattttaagatttacaaaacatctgcacgtcgtgtatttaaatacaatgtttaatgatattggtacaatccatgccaataatgttatctgtggtaccatcaggttcttaaagtcaacagaaaatcaagacaatttaaatttaacaaatcagtaaaaaaaacctgaatagcatgggcttggaatgcccgtgatgcaaatggaagagaacggagtagaactgacaaaagtggagtatgcttaacacggtgaccagaatcatgtagtttcaagctaccatttgctgaaggaacattgatctgcattgaagaacacaagtcaacaattaaggaatttcagagtacaagcagttgaatctataatgagcaaaacttccactactgagaagcggagtaaaataaattaagggttttttttcttttttttaaccaaaatttagggctttatttgtttcaaaaatgttctcgaatgtctcttattcaaatacttccaagatgattgggaaaatgataaacataataaaatatttccagtaaaaagaagatcaatataacccaatagaaaccaaaaacatggatggccagcttttgataaatgtttggttacatttgttgagctaaagttttctgttcgagttagtgatgataatgtaaaaacctcttgaacataaagactcgttaactggtagttctgtttgaactatagaggttcctgttgaagttttttgttgcaatgtgtcacttatgtttgcagcaccatcctaaaagtcatgattgcatcactggcatggacccattagtgtaattctggaaacgtgttgtatattaattattcacaaggaacttaaaggcttaaagaacaccataccacagcagaaaataaagctttatagacatttctggtcataagccttcttggagctgcttggaaagctttctgcattgcaaagagcaacaaagaaactctgtcttcaaacatggaatttccttcgccattagaggtagttaggaaactgctgggcaactttggctttgcagcaggcaagttaaatttcaggtgacctgatgcaactaaagcacccaaaacatgaacaattccaacaagaactccatctccattatcgatattgtatatgtcgttctgaacattgtctgcaatattcagaaagtcaatgccacctagattctttaggaactgattcttcaataagcaccatttgctagagaatccaggttcagtgctgccttcgtgacagggtggttcatggtgctccaatggttgagtcttatgaccattgcagtttgcttcaccagcagtagttttcaaatccaaatcactactaatagattttgggtcagaaccagcattccacagagaattctgtggcacaatacaactgtcggaaatattgttatcaccagatttagcctccctttgcaaaagaacaagtaatgcctctacacctcctcgggaaatgaatgactgagcaaacacgttggctctagatgtgtttggatgtacaatcaatctatagatgaggagcaaaaccctagcaacctgacaaagcatatcgttaaaatcaccacaacagcacactcttactcagttaccacttaaagaagatatgtagattgagatcatgggttggctgcatatctcattcactaaaggaaagtagaaaatatatatgtgacaaatcatagaaaccacatttgatctttagaagaaaataattgcgaagaaacattttatagttcaaaatctagcaatgatgtgattaacaaagtactgttactttggaattttgctgtactgaaactaacacatctcattatatattgagatgtgagcttaacatgttctaatgaaccatgaagattaaaaattggatatgaaaggatcaagtgtaagcatcatcataatgccaacaaaactatgtcaagaatgtttgtttcgtgattgaaactaacatatcagaatatgttactaatgtgtgagcctttacatgttctggcaaaccagaaagattcaaaaattagatatggaaggagcaggtgtaaacatcatcacaatgaacaagggaaatgctggcgaaacgatgagaacagtatttgcttcatggaatgtgcaaagtccagttacctggttaggttgtggacagtcaacaacaaagcccaccaaagagcgaacatcatcagaagccaatgtagaagatactgctcctagtaacagttcaataacaaccaaaagctcatcaacaagagaattcactttctctaaaggtctctcagttccagtaaatgtgaatgtatcgattgaatctgcttcatgaattacccagtaacaccttctgcacccatcaaggagcatctgtagtgcatttgcatcatgcatgcaagccgattctgcaaaaaccatgtccgcaagtgaagatagaagctttttctgcaaaacgtagttgcatgaactccacatcttcaggtccaacagcaaagtgctaaagagctgcacttttagaccatgatcatttttttgagactgacacagagatgcaattgctgcaacaagctcctcatcactcagtatctctttctccccactttctaatctcgatagtgtttctaataggtaatgtaacacttgtgataaaagctctggtccatgggcacggcatagctcttccttatttccaggatgttgagttgccagcgaaataatcctaaaaataggaacagaaagagaagcagttgcaagagacgatgacaaatccccgagtataggttccatattatccatctcgacattgctcacagtcaatggtagcaaagccattggacctccataagctaatgcccacaatgattctgcaggtcgcactcgatatgataaatgaaccatcccaagaacttctgcgggtcttctgtgggtacctgaggttcaacatccaataatatcagtaatgattcttctaaatcaaccccaggcctttgtgcctttgtaagttatattattgcatggcatgtgtttttacacccattggaaacaccctgatcccagataatcgttaacagcatgggactataacattttgtttggatcaatattcaatataggcatgattgatgccagatagaaaagttatgcagaacgtgctaggcaatagcaggcaacccaagcaggaagtaataggataatcttttagcagactgagaaacattagtgtaactatttaaccacgattgtgagcctgtaagtagactatggttcagctgccaagtaacaaagtactctctctgtttcatattataagtcgtttgacttttttcttagtcaaacttctttaagtttgaccaaatttatagaaaagtatgttaacattttcaatacaaaacaaatatattatcaaaatatattcgatgctaaatttaatgaaactagtttggtgttgtaaatgttgctgttttttcttataaacttggtcaaacctaaagaagtttgactaagaaaaaagtcgaacgacttatgatatgaaacggagggagtagaaactaagcaaggaaagtatgactggcaatttataatctacttaattatcaggtggataggagtgcaacaacagtctgaacaatataaagaaaaaggcaagcataaaacaaacctgttgaaccagaaggtgaagcatcaggacagaatcgaccattgagtagactaggatgataaagaagatgtaagcttcctccaatctcaatgtcaagtgtataattgtcttctgcaatgtgcctaatgtgagcatttgtagctttccaaggcaaaccagaaccattgctgaagctggggagtgcatcaccacccctagaagctatacggctcattctctcaggcccaattgactctgtgaagatgtagataggccccatttctgcaaacaatggacattgtcgccggcgctgctgcaggcccgcaatagttggtggtgggttcgtcccaatgcagcagaaggccagaggtttcaagatgcgaggtaactcgaatggacagctctcatgaagctccccatccacatacaaccgcaattcactctcgaccttccctagcagggcctgcttgcttgtgtactccaaaccaacaaaataccagcactgtggtctgaattcataagtgaaatgcagagaagccttcttccccttcccagccccactctccacgaccagaaactggccatggaagtaggcctccacgccatggttatccatagtgaggaaacagaaaagtcggggcatgtgcttcgtcccctctcccgcaagtgtgctagcagcagcggctgctgctgacggtgatgacttcccggacgttgaggctgcggcggctgcaattgctgctgtagccatgcctgtgttgagcgagtccgagaatgactcaacatatatccacgttgcaaaaccaaaaccgtttgagaatggccatcggctttccgcaggggcaagcaagccagagccctccccaccgagctcaaatgtcactgcaggacccttggcctccttgcagcccacagccttctccaacgcaagggtcagcgacgtggcccagcacgtgccaagtgtcttcttgatcaggaggagccaggaatgtaggtccttgacactaaccgagtgcccacccagcatctggatgcattgcacaagcggtgctccgtcccacttgcttctctgacccattccgacgaacagcttctctgcagcgtcgagaaggatggcgagaaggcccgatgaagtgcacatggtgcggtttcgggtacaggagctgagggtggcgaggagggcgcgggccatgcgagtgcgtggcgacggctcgacgccgcaggggatgtagggcaggagctcggccgcgatggctgccgcgcgcgagctggacatgatgctaggcaacgtgacggcgccgtcgcctgccccctcgtccagaccgtcgacgccgcccatcgtgagcatcagcacgtccacgacgaaatgcgagagctctccgtcctctccggagaccatctcgcggaggcgctcgaggccgccgcccatgatcaccgcgtccaccgcccgcaccacctcctccggcacgtccgacggcacgaccggcgccaggcgcttccgcagcgatggcggagaaggcagcgcggaggactccgagggtgccaccggcgatccctcgctcatctccacgtccgacacctcctcctcgtcgacgatgtacgccgcatcgccgagcaacgcggcgtcgaaatgctcgacgccaccgggctcccacggcagccgcggcgaagcgtcaggcatctcgggcgcgtcctcctcccccatcacgtaggctcactccatcaaaaacaaaaaaacaaacaaacaaacaaacaaaatcaagagaaacgcgcgaggaatcgatcgattagctcctggagcagttgggatttgggaaggatcaaacgcaatggggaaaaaattgggtaggaatttttgggggaaacggtggaggctgaggtgtgcggtcggggagaaccaggaggcctctgggggaaaatgcccgcgggagaatagcggcggtggcatggcatggtgcatggcgaggccgtggccgcccgagaggcggaggaggaggaggaggagagaggagagagagggaagcggccaggcgaggaaggcgaaggagtggcgtcgtcgcggggttcacgggtcgcggctgctttctagctgggccggtctggtgaatacgggttggaataagttcatttaaggtcccttaacttgtcaacaaatttgattttcgtccttcaatcgaaaaaccagatacaacgggtccctcaactatcaaaaccagtgcagatgatacgtggctaatttgactcggtcttcatctgacgtagcattgccgtagcgcttacgtggcaattcgatccgaaaaataataaatctcatgggacccacatgtcagtttcaacaaaagaatgaattaaaaaatggtggggcccatatggccccacatatcattgtcacccctcctcttcttcctcctctctcaccatctctcccctctcctccctccaggcgccacggggccacggggaggtccggcggcggcggccggcgacgtgggagaagggcagtgggcagggcgtcggcggcgagagcgctgggtcttcgctcacggcgtcggcgcgggggggctcgtggaggagatcggggccgcggcgccgcccgtctccgacgagctagagctcgtgcgagcgcagtgccgggagctgcacgactgccgacgagaagcagaggaggttcgaggtgtacaggagcaacgttgagcttgttgagaagttcaactccatgtgcaatggctacaagctggctgacaagaagtacgttcgccgacctgacgaacgaggagttcagagccaagatgctggggttcagacctcatgtcgcaattcctcatagcaatgcctggagagagcagtgatgatattctgccgaagagcgtagattggaggaagaaaggagcagtggtggaagtgaagtaccaagaagattgtggtgtgtgagcaatagcatggtaaagaaagattcaaacctgtaaaaatgttggagattaatcgatggaaatctgggtgttgtgtggatgcaggttcttgctgggcgttctccgccgtggcggcgatagagggtgacggagcgtggggctcctcaccgggagaccgcgcaggcccccttcgccggttcggccggggaccctgggtgagactctaagctcccaatctgtggaaggttcgcgagacaggaaacacacaagacgccggcgatgtatacagattcgggccgctgagaagcgtaataccctactcctgtgttttaggagatctgtgtataaaggagctacaaagtatgagccagcctctcccttgttctgggttcccaatctggaaaagtcccgtcctcccctctaagtgggcaaggtcctccttttatatcttaaggggatatcacatgcaccatttccctcttatgtgtggggacttaccctaccttttcataaatggacggagatttgtatagttgccgtccgagtcaccttctgatgggacggctacctccactttcgttgggagcagatgcgacgtggaatcgtggctgtctactgacgacatgaccggtgtcagaccagtcacgtcggtcattcttgtccaccacgtgtcagcttagcaatctacatgttcgcccttcttcacacaacatcttgcctgtaatggttaggatgaaacctggcatatatctgaccaggactaacgtgccatctctgggaggtaacacgctagctccagctggggacgagcgcctagaagccctcgtcctgacgggatggggcgaggcgtgcgtcagatcgcctgtcgccacctaacccgcgatctgaccggtctgtgactggtcacagaccggataaatgagtgcactgtactgcgttacatgcggcgtgacacgctcagccaaaccgcaataaatgtggttaggtgagccccactgtgctcacctaacctatacacgcggagcaaaaacccacgaggggtcggggcgcctcgaccctcggggccgaggcgggtgcggcccgaccccctcggggggactaagaggagggcgaacacatcaccctcgggcccgacgtccctcgagggtgccaggccacgtgggcgattgtgtctgcctcaaacctctagtcatgatactcctgatcccatgtcaccgacagtagcccccggcgttatgccagggcgatcgccctctttaagggaagcggtcgggcgtgacgccactcctaaggcctggtgacaggtgggaccggtctccacaattgggcagaaacccaacggtcacaaatcacgcacatcggcaatggtaactcggctgtcaataatgagcggtctcttcaagactgccacattactcgagtagcacacgaatctggacatggcgattcgtttcgtctggagatatggtaacgtcgcttcggccggcgagcgtaactaacgcgcacacgatatgatctatctcgactgccacaaccgcatatccacctcatgcgccgcaagcgggcgaatgggatttagtggaagcgtgggcgcgagaaacgagggggcgaaatagtgggcgcgagaagcgaggagccgggcacagcgttggcaagagtataaaggcactgaggaagggatctgtttccttcctttcgccattattccccttgtcttcgccgcttgcgccctaactctttctttcctgtgccctaccttcgccacacgcgctcgctcttaatcttctcttcctccggcgccatggcacggggctccgctctgctcgatggtagcgtgctgccgccctcccgcatcgtgagcgagaggcaggctgggctgtcgcgccgcttcatgccggaatctgccaccggccgggagatagtcacgctgggcgagggacgcccggcgccagactacccggggcggtccgtcttctttctcccctttgcaatggcagggctggttccgccattttcttctttcttcatggatgttctggagttctacgatctccagatggcgcacctcacccccaacgcggtgatgacattggccatcttcgcgcatctgtgcgagatgttcattggggtgcgcccatctcttcggctgttccggtggttcttcaccgtgcagtcggtgtcgccgccatcggtagttggtggctgctacttccagccacgggggccggtgctgaaccgctacatcccctgcgccctccgcaagaagtgggacgactggaagagcgactggttctacacccccctcgccgacgaagcgcgcctccgacttccgagccagcccccggcgcaggcctccagctggcgggcgccggtagatctgggggatggctatgacgccgtccttgaccgcctggcgggcctgcgatcccaggggctcacaggggccatggtgtacggcgactacctccgtcgtcggattgcgccgctccagcggcgcgctcggggcgcctgggagtacaccgggtccgaagacttcatgaggacccaccagggagtgagatgggactgggctcctgaggacttcaagatattggtccaacgggtgctgaatctcaactccgtggaggcgtccctcattccccaaggaatcctccccctctgcagcgatccagaccgcgcctccatcctgaccattatgatggcggtcggggcctcagaggagcgagctccaaagggccacgatggcgcaggcgggagccgtaggggggaacaatctaccccgggagggggtcgtgcttctgggtcccgcgacaggggcccggggagcagccgccctgccgacgcccgggggaagaggaagcagggaggaacacctcccccatctcctccccgagggggcggggcggtgcgtgccagcagcaggcgcccggagggggccgcgccgacatcgcagcccgagggggagcgcaagaagaagcggctccgcaagatgggggagacagaaccatctcggggaaacctcatttcccctccaaagtggtcgtttaaccgaccccctcgcaggttcgtctctcacccatcgtggctgtattcactctctcaacgcgagttttcactcacccatcttgttcgtcttctagtcttttcttttgtttcagcgagatcccgtcgcgtccctcccgccattccaagtccggccagtctgaggccgaggatccggcggccgcagaggcccggaggcgggaatctgaccggcgagaggctgcggatcgcctacgggaagccgaggaggccgcccaggaggccgcccgggcccgccaggccgaggaaaccgctcgggagggggccgcccgggcccgccaggccgaggaagccgctcgggaggaggccgcccgagcccgccaggccgaggaagccgctcgggagaaagccggatttcgccaggacgaggcgatggcgacttccgaggcagctcgcgatgaggccgcgggcgcgtcgcttgggcccactccctcgggcgacgctcaggcgacaacttccggggcagctggcgacgaggctgcgggcgcgtcgcttgggcccactccctcgggcgacgctcaggaccaaccgggtccgggggacatccccgagtccggcacttccattggcggcccgagccgcgtggcatcctctccaaggcggctcttccccacgccttctatcgccccactgaacacagagccccttctgcaggccttggccgccgcaaacaccacggtgttggatgggttaagtgcccaggtggaggccctgcaggcagagcgggcggagctcgacgccgcgtgggcgcgtgtcgaagaggggcgacgctcggtggaggccatggtggaggtgggccgtaaggctcaccgccggcacgtctcggagcttgaaacccgtaagaaggtgctggcggagatcgccaaggaagtggaggaggagcggggggctgccctcattgccaccaccgtgatgaacgaggcgcaggacaccctccgccttcaatacgggagctgggaggcggagctagggaagaagctcgacgccgcccaggggatgcttgacactgccgctgcccgagaacagcgggcggcggagaccgaagcggcgtcccgacggcgcgaagaggcccttgaggcgcgcgccatggcgctggaagagcgcgcctgcgtcgtggagagggatctggcggaccgcgaggccgccgtcaccatccgggaagcaacgctggcggcgcacgaggctgcctgcgccgaagaagagttcgcgctccgcctccgcgaggacgcgctcaccgagcgggaacgagctctcgagggggccgaggccgcggcgcaacagctggcggacagcctgtccctccgcgaggcagcgcaggaggagcaggcgcgccgtaatctggaaggtgcccgcgccgagaaggccgcactgaaccaacgggccgctgagctcgaggcgcgggcgaaggagctggacgcgagggcgcgcagcggcgaggcggccgcgggcgaaagcgacttagccgcccgcctcgcagctgccgaacacaccatcgccgatctgcagggcgcgctagactcgtccgccggggaggtcgaagccctccgcttggcaggcgaggtagggcccggcatgctttgggacgccgtctctcgcctagattgcgccggtcggcaagtgggcctctggagagggcggaccgtaaagtacgccgccaaccagggaggcctcgcccagcgcctctcgaagatggccggggctctccaacggctccccgaggagctcgagaagacaattaagtcatcctcgagggacctcgcccaaggagcggtggagctcgtcctggcgagttaccaggccagggaccccaatttctctccatggatggcgctggatgagttccctcctgggaccgaggacagcgcgcgcgcgcaggtccgggatgccgccgactatatcgtcgacagcttcgagggctcggcccctcggctcgcgttcgcccccaactccgacgaggagggcaatgccggtggtacagacgacagtgacgacgaggccggcgacccgggcgcatcggattgagccccagactcccgccattcttcagttttttcttcttttctttcttctaaggccttcgggcctcttttttgtatagatcaacttaatctgtaatcaaaaatgaagaaatttttgtgttaatttcatcttgctgtgtgtatgagatgaggatgatctgtgccgtggtccttttgtgtcttagcttgactaagggctcgtgcccaggttctagtcctcaaaaggcgcgggtcggggctagtgcctggggagatccacatgtcgagactggccaggccgggaacgtggtgaccgagggttatgggtgacccgattgtgggtttttgccgattccccccccccccccccggagttcaccacgccccggggcacggctcggttctgggccccgtttggcgattttagccgacccgagcccccgagggcaggattgagcgcgagtgacctatttcaagtcaagattcttcaaaaggaaaaaacagcacagacacagcctttaggaaattgaaactgcttttattgaaatactgaaaaaaaagaaataagaatgtgcatgtgtggcagcccccgggcaaccctgcacgcccgagggggtgcggggttggcccgagcccgaaacctgacacccgaccccccccctcaggggtagaagcgacgaaggtgttcgatgttccatgggttaggcagctcagtgccgtcgcccgtggccagccgtatggagcccggccgggggacgccgaccactcgatacggaccctcccacattggtgaaagcttgctcaatccagcaagcgtttggacgcggcgtaggacgaggtcgtcgacgcagagtgatcgggcccggacgtgacgctgatggtagcgccgtaggctctgctggtagcgcgcggctcggagggccgcgcgccgccttcgctcttccaagtagtcgaggtcatctctgcgacgctgatcttgatcagcctcgcagtacatggtggcccgaggagacctcagggtgagctcggatgggagaaccgcttccgcgccgtagacgaggaagaaaggcgtttccccggttgctcggcttggtgtagttcggtttgcccagagcaccgctggcaactccttgatccatgaatcgccgtgcttcttgagtatgttgaaggtcttggttttaaggcctttgaggatttccgcattggcgcgctccacttggccattgcttctggggtgggcaggtgaggcgaagcagagcttgatgcccatgtcttcgcagtagtcgccgaagagttcactagtgaattgggtgccattatccgtaataatacggttaggcactccaaaccgggccgtgatgcccttaatgaatttaagtgcggagtgcttatcgatcttgacgaccggataagcctcgggccacttagtgaacttgtcgatcgcgacatacagatactcaaacccgcccggggcccgcctaaacggtcccaggatatcgagtccccagacagcaaatggccacgaaagtggtatggtctgcagggcctgggccggctgatggatttgcttggcgtggaattgacacgctctacatcgccggaccaggtcgaccgcatcattgagagctgtcggccaatagaaaccctggcgaaaagctttaccaaccaaggtgcgcgaggcggagtgggctccgcattcgccttcatggatatcggcaagaagcacaacgccttgttcccgaggaatgcacttcaggaggattccattagctgcgcgccgatagagggtcccttctaccagcacgtagcgtttggagatgcgatggacgcgttcactcccttcgcggtcctcgggtagagtcttatctgtgaggtatgcttggatctcggcgatccaagcaatcaatctaagggagctgggagcactcccctcgggtcccgaggcctggactccgacgggcctcgggggccggtcaggcgcatccgtctcccctaaggggtcgggtcgcgccgacggctgggcaagcctttcttcaaaggcgcccggtggggtctgggctcgcgaggacgcgagccgtgagagttcgtcggcaatcatgttatcccgtctgggcacatgccgaagctcaatcccgtcaaaatggcgctccatacgccgtacttggcgcacgtaggtgtccatctgcgggtcagagcaccggtactccttacagacttggttaacgaccagctgggagtcgcctaacaccaggaggcggcggatccccagtccagctgccactctgagtccggcaaggagtccctcgtactctgccatattattggtcgctcgaaagtcgaggcggaccaagtatctgaggacgtctccgctcggagaggtcaacgtgacccccgcaccggcgccctgaagagacagggagccgtcgaactgcattacccagtgggcggtgtgaggcagctgcgaggggtccgtgctggcctcggggatcgagacgggctcgggagccggggtccactctgccacaaaatcggcgagggcctggctcttgatagcgtggcgtggttcaaagtgcaaatcgaactcagaaagttcgattgcccatttcaccacccgtcctgtaccctctcgattatgcaagatttgaccgagggggtaagacgtaaccacagtgacccgatgcgcctggaaataatggcgcagtttcctcgaggccatcagaatagcgtaaagcatcttctgggcctgagggtatcgggttttggcgtcccggagggcctcactaacaaagtagacgggccgctgcacctttcggtggggccgatcctcttcgctaggggccgcatccctggggcactcttcgtccaagcagccttgcggggcgcacttgtcttctgtgctgatgacctcggggtcggaggataacaggggcggccttcccacagtggcttcggggccgtcctgggggtcgggggctcctggcgtcgtcggacaagcgggcaaagggccaactccggtcgtcaggggccttaggcctccgttcggctcgggggcctcttctccctgctctttcccgggttgagtcagcacagggttagcctcggggtcaaagggcgataggtgcggccttcccacagtggcctcagggccttcctgggggtcgggggctcctagcaccgtctgacaagcgggcagagggccaactccggtcgtcgggggcctctcctccctgctctctcccgggccaagtcggcacagggtggggaagcgtgaaatgagaattgtcctcatcgcgctccacaaccaatgccgcactaactacttgcggggtcgccgctaagtagagtaacaagggctcgtctggctccggggcgaccagaactgggggagagcttagatacgccttcaactgggtgagggcattttcagcttcctccgtccaggtaaacggtccggagcgtttgagaagcttaaataagggtaacgccttctctcccagtctcgatatgaaccgacttagggcggccatgcaaccggtgacgcattgcacatccctaagtttgctgggggggcgcatccgctctatagcccgtatcttctcggggttggcctcaatgcctcgggcagagaccaagaacccgagaagcttgccgcaggtacaccgaacacacacttatcggggtttagttttatgcgggcggagcggagactctcaaaagtttccgctaaatctgagagtaacgtttcctggttgcgcgtctttacaaccaagtcatcgacataagcctcaacattacgtcctaattggctacccaaagaaattcgagtagtacgttgaaaagtaggacctgcattctttaacccgaagggcattgtcgtataacaataggttcctatgggggtaatgaacgcagttttttcctcatcctccctagccatgcgaatctgatggtaaccagagtatgcatctagaaaacacaaaaggtcgcaccccgctgtggagtcgacaatctgatctatgcgaggcagggggtaaggatccttaggacatgccttgttaaggtcggtgtagtcgatgcacatccgaagcttgccgttcgccttgggaacgaccaccgggttcgccagccactccggatggatgacctcacggatgaatccggcctccagaagtcgcgccacctcctcgcggatgaaggcttgacgttccggggcctgccgccgcactttctgccggaccggccttgcgcccggccgcacggcgagacggtgctcaatcacctccctggggaccccgggcatatccgccggtctccatgcgaagacgtcagcgtttgcccgcaggaaggagacgagcgcgtcttcctatttgccgtccagaagaccaccgatccgtgtggtcttggatgggccgtcgcccagggcaacctccttgaccgggacctcgtcgcctatgatcatccgctgcctcggggtggcgggggcggaggcgccaagcctctcatcgccaccctcgggcttggacgcatcggcgaggtggtccgcgcgctgctccagacaagcgagcgcgactttgaggtcgccatggacagagatggggccaccggggcccggcaccttcatctgtaggtaggcgtagtggaccgccgccatgaacttcaccaacgcgggcctccccaggaccgcgttgtagggcagattgaggtccgccacatcgaagttcacccgctccgtgcggaagttggcggatccaccgaaggtgaccggtaggtcgatgtgacctaacggccacgtgtgccccggcgtcacaccgataatcggctgggacggccggagcaccatccccggggccttgatggcgtcaaaggccgcaggggaaaggatgttgagggccgctcccccatcaatgaggacacgccccaacttcacgttgcaaacggtgggggaaaccaccatcgcaatctgccctccccgggcaacgcacggtgggtggtcggtctggtcgaaggtgagggcaacctccgaccaccgcgcccgacacgtcgcctcatgagtaggggccgcggccagaagctctcgcttcatggccttgaagctccggcgagaaacgtgagcacacgctcccccatcgacagtggcaatggtggccccaggctcttggaaacctaggtcatcatcgccgtcatcgatgtcctcggcgggggccttctgcttggcctcacttcgccgattaccggaaggaaccgccggggacttgccctctcggcgctcctgcctcctctcctcctcccacttcctcgtccgctcagccaaacttttgactgcacggcagtccgcgaggtcgtgaagggaagtgttgtggacggtgcaccacttgccggttgggcgctccctgctgggagcgccggcctccttctttttgtctcctgcaggcctcccctttcgggtggcccgcgaagcaccctcgacggcgaggacatgaccctcgtcgtcggtatgggctgacctcttcttcctcctcctatcacgccgccctatctgagcggcggatcagggggcggccgaagctgccacaccggaaccggaggggttccaggtccatgcctcctccttacgagccactcggtccgcgagctgaaaaagctccgcggtagtctggggctctttggaggcgatcttttcgagcatgcggttgtgccgcacaccccccctgaacgcgtaaatcaccgcgtgtgcagggatgcatggtatggtgttgcggacttgacagaaccgctgaatgtacgagcgaagtgactcatcatcccttcgctgtactgcgtgcaagtccgcttcctcacctgggcgcggatatgtgccttggaagttcatggtgaactgttggcacaaatcctcccaagagtggacagacgcgggtggcaagttcattagccaaccccgcgcctgtcctttcagggtcatgggaaagaaattcgccatgaccctgtcgtcacccccggcggcctcgatcccggtcgtgtagacctggagaaactcggcggggttgacgctcccgtcatatttttcggcgatggtgggccggaaccttgggggccaacggacattccgaaggctcgccacaaaggctctacagccgacaccaccaaccgggggcacggagggctgatccccgcgtccgtggtgaggtcacactccggacgaggaggcgccctccgttgcgtggggagcacgtcggccattacgccggcgctcgatactgatgcgggcatccggttccccacgcagatcttcccgggtcggaggcgttgacgaaggagtggcggccgaatggcgaacagcggctgccgctcgccgcgccctccgtcttgacgacgcggagccggtggtagcagcaccagaggccttggtggcggaggaccgcccaccagcatctaggcgctgccgtgcagtcatgaccaatttggccacatcgtccagccaacgttgggctggagactccaggtcatgggcgacgggcgggtgacgtaggagcgcgcccgcagcttggagcgcgccctggggcgtgctgccgtcgccgtagacgaggaggcgacgctccccatctcgccgcccttctccacctcctgtgggtgtcgaagtcgcggatccttcggccctctcgagcgccttctcccgcctaggactttggcgtggagggggcggtggagtacgagctcgacggcgtgggttcggctccccgtcgtcgccactcacactcggagagaggtcgtgcgcctttgcttgctcggccatgaggctgaacaagaaaagcttggcgcacacggaagagtgcgagagctcaaaagatccctcgcagagtcccctacctggcgcgccagatgacggagcgtggggctcctcaccgggagaccgcgcaggcccccctttgccggttcggccggggaccctgggtgagactctaagctcccaatctgtggaaggttcgcgagacaggaaacacacaagacgccggcgatgtatacaggttcgggccgctgagaagcgtaataccctactcctgtgttttgggggatctgtgtataaaggagctacaaagtatgagccagcctctcccttgttctgggttcccaatctggaaaagtcccgtcctcccctctaagtgggcaaggtcctccttttatatcttaaggggataccacatgcaccatttccctcttatgtgtggggacttaccctaccttttcataaatggacggagatttgtatagttgtcgtccgagtcaccttctgatgggacggcccacaactacctccactttcgccgggcgtagatgcgacgtggaatcatggctgtctactgacgacatgaccggtgtcagaccagtcacgtcggtcattcttgtccaccacgtgtcagcttagcaatctacatgttcgcccttcttcacacaacatcttgcctgtaatggttaggatgaagcctggcatatatctgaccaggactaacgtgccatctctgggaggtaacacgctagctccagctggggacgagcgcctagaagccctcgtcctgacgggatggggcgaggcgtgcgtcagatcgcctgtcgccacctaacccgcgatctgaccggtctgtgactggtcacagaccggataaatgagtgcactgtactgcgttacatgcggcgtaacacgctcagccaaaccgcaataaatgtggttaggtgagccccactgtgctcacctaacccatacacgcggagcaaaaacccacgaggggtcggggcgcctcggccctcagggccgaggcgggtgcggcccgaccccctcggggggactaagaggagggcgaacacatcaccctcgggcccgacgtccctcgagggtgccaggccacgtgggcgattgtgtctgcctcaaacctctagtcatgatactcctgatcccatgtcaccgacagaggggatcaacaagaacggtgagctggtgtcgctgtcggagcaggagctcgtagactgcgacgacgaggccgtggggtgcggcgggtacatgagctgttcgagttcatcgtcggcaaccacggcctcaccagtcaccacggaggcgagctagccgtaccacgccgcgaacagcgcgtgccaggcggcgaagctgaaccagagcgcggtcagcatcgcgggctaccggaatgtgacaccagcagcgagcccgacctggcgagggctgtggcggcgcagccggtgtccgtcaccgtcgacgctggcaacttcatgttccagctctacggcagcggtgtctacacagggccgtgcaccgccgtccgccgacgtcaaccacggcgtcatcgtggtgggctacggcgagtcccccaacactcccgccactgacggcccgcccttcccccgcgtcgtcggccgccgccgccagacctccccgtgaccccgtggcgctggagagaggagaggggagagatggggaaagaggaggtgtgagaatgctacccaccattttttaattcattcaaactgacatgtgggtcccatgagatttattatttttcggatcgaattgccacgtaagcgccacgtcaatgctacgtcagatgaagaccgagtcaaattagccacgtaagcgccacgtcagccaaaaccgccatccaaaccgtcgagggacctcatctgcactggttttgatagttgagggacctggttttcggttgaaggacgaaaatcggattcgttgacaagttaagggacctcagatgaacttattccatacgggtttggagtgtcgcgcccgtttaggctcgaggaaacgtggcatgggctttgcccttgcagagtgttgcagggccgcgtacgtgtgctcgtgggctgttttgcgggagggaactgaaataggccattgggccgagcgatggcacacggaacctggaccaggacaagctgtgaaaagcagagttgcgaaaactactcacaacattccaagatttaaatacttctatgatttaaacattgttcgacaataaaataatttttagcactatttacttatcatatcaatcgcttcccacttaaatttctacctatcttacctctcccaatcttaaccagtcctcatttatcgagggtacccaaaatctgttctcctcaaccttataattgcttatatcagttgatacacgcgctttgctttaggatatgtggatgaatggatgtagatagatatatatgtttaaataatgtgaaaatattttggagataatgatttgacattgcttgcatattgtgttttaaaactacaataaaattgtaaataatatgtcatgtttgcatgatatttaaaaatactctagataataattgctagtaggtgatcatgttgcacacttacgtatgatttaaaatactttaaataataattgctagtgggtgatgatatagcacacttacatttgagctttaaaaattagtggacattaagtatatagatagttgaaacagaggaagtagaacacattccatctaatgctagtgttgtaagttcaagtgtcttaatttggtttcggtgattaatgacaaatctaattatatgagactaacgtttttatgagtctttctttgactagtcttatttggatatgaaagtaaaaatgatgggaggtatgtattaaacttcatatattctaacttggtctctcttgtggatccaaaatatagtgtgagctccctcattgatcttgattgattatgtgcatatgcattccttcatatccatatgtatgcacatcttgagagggagcttattctatattttgttcattataagatctctaccttgatttgaaattatctttcatctcatctctttgtattgtttatatcggattattatctatcacaaaagagaaaaaagattgaaagatcttggattaaacaatttgtgtaattgttactttggtgatagatgataaaccgatgtttatgggattaacctctcttttacataagttttcaacaaggttatttcccgataatgagatgtggtagatatgcattctttggtgatggaccttaattatgacaaggatgaaattcatggagataaagcgatatgtatcacttcttatctcttactttttcataggttcatatatatgattttcatgttattgttatataagtgtgagactaatgtttacttagtctcctttacattgagaacatggagatcatgaaggtatgtgtttttttgtttatcttcatcattactacatatgccttctctatgtgtataggataaacccccattggttcttctttacttatgcatacacttgtctctcttgtatatttctttgtatgcatatacttagggggagcaaatcctatacatttattgtgcatgttttagatccatgttgttcacctattatatatatcggatctttgcacttgagcttgcatacgagtatatgacacttatgatgttaatgaatactcaacaaacatatccatatctttcatatgtaactggttggtcaccaagtggaggatgccaaccgatttgttgggactaatgttttcctttgagccgtgcaaaggaatagatctaattgcgatgaggctaatgaatgacaccatgggttaatggtcaccaagccaaggacatcgtcatgttggcaagaatgaagtcaagcttgtgatgagaataaagtcttgacaaatgatggcaaagacctcggcataaacatggttcaaccgaatggtcacaagtgttgatgttggctcaagcattgaccccaagttggatggcgcaaggcaaaggtataatggagctaagaatgttttcttagtctttttcccggtcttggtgtttggtgtagactggatttactagataggtgccgtactatcaagaggggtctatgaagctagcatgtggatgattttgtaccatattagttcatatgcatataggttcattttgtgggcttgtctagccaagtgtggtgagttttatcaagtcccaaacaaagagagatgtgggcacatcctataggtttgggtagcctcatgtggttatgtccggtggagtatccttttgagtgtgagccatttctccctgagaaaatttgtgtttcttggatggattgttcatgggttggatatccctttgaataagctttccatagagtcctagaacaccaaattccgagatccgagtcaagagatatcgccgttttactaacggttggttgtgctgaaaagtgacctgcggtctgaccgtgggccttaggtcggtctgaccagggctgttagccggtctgaccggcgtggtaaggccggtctgaccggccctactggtctgttgcactggtctggtttttggtggcgatacagagcccgccagagccgcaaccggtcagaccgagccaatggcggtctgaccgagccgtggacggtctaaccggctgcttcactgcggtcagaccggccaggttgagtgggctcaatgattgccctgtaacggctaattttctatccgttacaaagtagtccggtctgaccggccactctatggtggtctgaccggcagagcacagagttggagatttcgactctaacggctagttttggtggttgggggtatatatacccactccccagcagcaagggcaaggttttggcactccattgcattatcttgaacccttgcaagagctctcacacccttgtgcacttagtttatctagtgaggtgttagagagtgagttaagccaatccaagtgcattgcttcattgttatagctagtgtggcacttgatcatcctcggcaagcatcctagacttgttactcttggaggttgccgcctcctagacggcttgtggaggtgttacccggtgacctctccgaggagattgtggaggaggcccggcgccggttgtgagtggtttggagttcaccaccttcggagtgaaggaagaactaccctagtgatcaaggctttggtagtcctctccgtgggccggctcccgccttgcccaccccttaacgaagggggcgtgaggtggcttcgtggttgagtggtggagttggggtcgtctcaacggggattaggaaaccggcgagtttctgaatctcggtgaaaattccttgtctcttgtctcctttattttgtgcaaatttactttgagcaagtttacatactagagtttatttgtgctattatcaccctaggcttgcaaacctcaacataggctagcttctttgtgcacttacttgagactagttgatttaggttttgaattgtgcaaaaccattttgatttacgcttccgcatacaaaactcggttttagccaaaagtttgaaaaaccgcctattcacccccctctagtcggccttcttgatcctacaagtgtggaagctgagaacttaccaatgttttatacagttggatggtactttgatgcttcggattattacataaggtatcttttgggtcttacgtagaaaatttctatcgtcgcttcccgatattatttatacaaggtgattccccgcgcttttgcatgagaattactaagcagttttcaatatatatttttcgacaatcaagctaggagaaaatagaaaataaaataatgaaacgtgagggtttatcagtacttatcataaaacaaacaaatgatacccacgatttaatgtagaacatattgataactatatgttaaatattataaaaataatatatatatttgttaaaatattgtagaaatgatgtgaggggtaataatttgataaacttgcatgttgatttgtataattaaataaattatagatgatgttgtgtgcttgcttaaggttaaatatgtaattattgatagtgggtgatgatgtggcatggttgtatgttgagttttaagagttagtggtcatcaaatttatagtaagataggatttgtaactaaagtgtacattgctatataccaataaacaacaacgatgtcgtagaataacacatgtgttagtgtcctaggtaaatgatgtaccctgcattgcacatatctcaaacggaaaataccgcacaccaaattatataaaaaataaatccacgaaatagagattgggtaagaagtggtggcatattggggtaaagtacatggttcgactggcctacagccacaactgctcagtatgtatccttgtctcccaaactttacttgaactcttgaagaagggggcaaccctaaggtataatgacatcacatccttgaatgggagagcatcaagttatatatcaatcaagataagccgtaggtggcgtagccagcgactacaacctgtggggttaaagttgtaaaattctttaagttttatattgttgcaacacaaatatcaatagttttttgggttgttttgcaaaaactatttcctcgtagcattgccattactacacgtagcttcgctactgtaagccatacaaaaacatatatcgatttgatattcgaaggaatcccaaagcccagccaccgaccatatcgccaaggtccaccatttagaatctcacagacttagtcgaataggttacactatgatttatccatgcgttcttattctatcttggtgtatacccttataagttcatagtcaagcatgaacccaccaacattttggttaagtagtgggtcgaaaccacgctcattcgtggtagatcaatatgtttattttcatattgcttatagaattaatagcatgccttatgtatttccatggccgtattttttttggtagttatgcctgtcagggttacggataaggcataccctctatcctacgacttatggaatataccgatgaggtataccttcacgtatgcgggttgtttccgtatacgctttaggaatttatctcaagttatggaaaatatctctatgagtttaggaattgccgaagtcctactcggaaagggtaaaatctctagtatatcgtgtcagtttacatatctccaagttttacttgggggtgaaggtattccacggtataaaagggacccttagggagaggcaaagggcatcgcatctcatcgccaatacacccaccaaagtttacgaagccggagttcacggagccaactcgtcaggagatctcgtcgaatccctcgactacgatctcatcggtatcgcctgtttcggttactttctttgtaatatgttctcatcatcatcaatcccatataaactggactagggctataatctgataaggggcctgaaccagtataatctttttcttttgtatgttttgatgtcgtactacgtagacccctgctccaacgtaccccaattctctattcatccggtccgcgagtatcactcgtcaacaatgcatgttgtatattttcctgaacatgaataaatcaaatggctagtcatattttacgtacttacggcccttgttaaggccaataattcccagttagtttttctttgtgaaactaggcaaagttgtaacaaggtccgtcgtcttcgtcgtaggttgggcttaagtggttttgtcggagtggatagtaatggcctgagtggaggcctcgctttgttttggcatgaaagttttaatgtcgaaattaaatcagttaatgatagatttttgatgcttatattcgtgtgtcccctactgcacctctttggcatatctcttgtgtgtatggtgaacctcgtacagagaacagacatcttatgtggcaacaccttagcagccttagacaatcttccactttaccttgggtagttctaggtgacttcaatgaggccctttggcagtttgagcacctgtcaaagaatcctagatctgaaatccaaatgcaagcttttagagatgttttagatgtttgtaatcttatagacttaggttttgagggtaatcccttcacttatgataacaggaggaaaggcagtaacaatgttcaagttagattggatagggtggttgctgatgaaagttggagggatatttttagtgcggctcatgttgttcacttggtttcaccttgttctgaccatgtgccaatccttctgagattattgcaggaggaaaaccataatcaccggaagaaatgtcgacactacgaaatcatgtgggaaagagaggctgagctaccacatatcatttcggcagcatgggaagctattgaatgcaaaacagatctaggcaacatcgaagtgggccttgacaaggtcatgtcagatttacatacatggggaagcagaaagtttggcaatgttgtgaggaaaatagaaaagttaaggaagaaattaggggagctccagtactctaattcagaccaacatgagatcaggaagatcactgatgagatgaatgagttactttacagggaagagatgctatggctacaacgctcccggatcgactggttaaaggaaggtgatagaaatactaaattctttcatggtagggcagtctggcgatctagaaaaaacaagatagaaaaacttaaggcagctgatggcaatgtttactcaaatcaggaaaccatgggtaccatggcaacaaattatttcaaagagttatttactaaagatccaaatctggtgccggctaatgtggcaaacttgttcgccccgcaagtttcttcagcaacaaatgaagccctgtgtgcagatttttctgaggaagaaatatcaacagctctgtttcagattgggccaattaaggcaccagggccggatggctttccggcaagattttttcaaaggaattggggactcttcaaggacaacattgtccaggctgtaaaaaagttccttgatacaggtcaaatgccagaaggagttaatcatactaccatagtgctaataccgaaggtggatcaaccagttgaaatgaaggattttagaccaatcagcttatgcaacgttttatacaagattgtctcaaaatgcttggttaacaggttgagacctctgctgggtgatattatctcgcctaaccagagtgcgtttgtccaggggagaatgataacagataatgctttgatagcctttgagtgcatacatcatatacaacaagtgaagagaccagacaactccttttgtgcttacaagctagatttatctaaggccaatgatagggtggattggtgtttcttggagcaggctatgcataagataggtttctctaaccggtggattacttggataatggcgtgtgtttcctcggttaggtactctgtaaaattcaatggaaccctattggaagcatttgctccatcgcgtggactgcgacaaggtgatcccctatctccctttctttttctgtttgtggctgatggtttgtctgctttattaaaggaagcggtgcaaaatggtgaaataactcctgtgaaggtatgtcgtagagctccaggcgtgtcacacctcttgtttgctgatgacacacttctctttttcaaagctaactcagatcaagctaacatggtcaagaatgtattagagagctatgcagctagtactggacagctgatcaaccctcaaaagtgctctatcctatttggccatgcatgtccagaagagttacaggaagaagtaaagaatgtcctgcaggttggtaacgttacttttgaagagaagtacctgggcctcccaaccccggaaggacgaatgaaaaaagggaagtatcaacggctgcaagaacgtctgagtaagaaattgatgcaatgggcagagaaccacttgtctcagggtggtaaggaagtcatgatcaaagccatcgctcaggctatcccagtgtacgtcatgggggtcttcaaattaccagatggggtatgtgaagaactaactaagattattcggaacttctggtggggttttgataatggaaagaggaaggtgcactggaaagcgtggtctcaactcaccaaatcgaaaaatgctggtggtttgggatttagagacatgaaagcattcaatcaagctctgctcgcaaggcaagcatggaggttaattgataatcctgtcagcctgtgtgcaagagtgttaaaggccaagtattatccaaatggttgcctaatggacacggttttctcaggtaacgcatcgccgacgtggagagcaatcgaacatggtctggaattactgaaggaaggattggtttggcggataggtaacgggacaagggttcgcatttggagagacccatggattccacgatcgttgtcgaaacatgaattcggcaataataaaagggggtagcgtacgagacctaaaagtggatggatgcggagacaaaggatttagacaggttcaggccctctcaatgagaggtaataccctactcctgtttggggatttgaatccaccgggtgtagtattgatctgacgatcaggttgtgtcatgccccctagagggcctcctgcccaccttatatagggtggggggcaggattacaagatagaaaccttaaccaatacggtatcggtttcctaaatctactttacaatattatcaaaccaggactttaggctgttccgtaatatataaggaaacgtaatacccgagtcatgatctattacatattccatagatataagttatcccctatgactagtcggataaccatgccgtatgggtatggggtacccataatatccacagtagcccctgagaccttcgcagtcgaaaagataatcttctctcgaaccagattactccaaagccgagtgcttcaatcatctttgtcatggtctcccgagtacttttaccaaatctgaagactgtggagggctggaaaataaagtcaggtgcaccgactagatgcacctaataggtgtagcccccgacaatgtggttaattgaacaaaccaagcatatagtcaaggaataaataatccaaccaaccgagtggttttgataatcgtaatcaaccaagtgacttgatatcaatatatagcatatgcggtgtgaatcctccaaataacatgatccgagtgatataccaactgctttgtaaaatatgatgagtgatatagcaaaatagctataaagaagcttgtatattgtgaataaagaaatttccaaagtattgggcatacgccatgcgcacactgctttaacagatgtgcttaagtccctagaagacacatggtttcaccacacctggaaatatatggcatatgtggtgtaaaatccgagtaaataaactcataaaggatttaccaaccgcctagaaaatgaccacaatatataatcagcctaagccataatattggtcaataaaaatgcacacttacgtggcgaaaagcaatgatattgtatccaatcaattgcttaaaaacccaaacagcaccttgacttatatataaaaaagtcagcgggacagctatataaagctttactgtttgacaccttttaagatgcattgtaccaactcctaaaaagttaagtaactgcggtataaaaggattttaaggtattgggcacttgatcacgcgcactttggcctaagcaaaaagtgcctaagtccctaaaagaacgtgacaggccacacctgaaaatatgggctgcagacatattaggcctaggccaaaacatatgccttcgacaccctttaaaggatgacgcatataacatgctcccgagtaataaatcttccgggtaatatagaccaagcgtagctcatatgaatagcttctgatctgagtggttatcccttatgggatactccaaaatagatgtaacaattgaatcccgactggcgcaagtattcagttgataacccttacggggaataataaatagtccagtctttgagcatataaaatagacccatgatcatgaattcatgttgcatgtatccggagcaagtccaaattgaagatataatacttgtatttgagctagtaagcccctgagcacgtagtcacaattcttcatcgatggtagctgacgcagttggcatagagacaagacaaccaatatagagagaatattgcccaccagaggtggcaaaaatattggtggtagtgaagatagtgataccaatcaaaagtactgaagtcgcatagccatggaggcgaagaaaccagtcggcggcagtcaggtcagccagcaatgaatatgaaggcgctcagcgataaagttgtgtagttgacgacgacaaacgcaaccgacatgatgaagatgacgatgtcggtgatccagccaatagcagtgtagcaaccaatgataatgacaaagacactcatcagcatttgcatagtaggtcaaccgtcaaggtgaaataataagtcggcgaaaacataatcatccattagcaacagcagagatgtcagggtcgatgaagcagaggtgctggtgatgatgtcagtgacaataatccatcaaattaatgttatagctgttgtagatgcttcacttggaggagaattgatgttgttgcccaactcgtctaaaccgaaatatttgaagttgttgaagtagaatgtctgctccgaagcaaagatgaagataatgactcctggagttgactcgtgggttgatgaattgatttcttcagcttgacataaattttgtcaaaattttgagccttgtatttgtgtagcccccgactctttgattagttgggaaacaactgaacatagagtcgagaactgtagcctcttgtcgtcgaatagttattgcttgattgaagatatgtgttgaagatgtccaagtagaaatcctgaatattggagagccacttgttgtagtaaaataacacggcatcgcatgccgagatgtcgaggttcacaaagacgtcgtggttggtgaagtagcaaaacttgcgaagtagcagcaatagagtttgccagtgacgaagataataaagatgaagtcgctccaccatgatgacaaagttgcatcgccgtgatgaagtgaacacgagtcggcggcaacagaagcaaactggtagcgaagacgcgcagttgtgaagataaaagcaccagtcggcggcggcataaccagtcggcaacggaagacgatgatgtccatcagtagtggtagctgtctaaaccagacgtagaggtgagggcactagtcagcagcagatgtagacagcttgcgttgaagatgatgatgcttattagcggtgatggtgatgtagccagccgtgaagaagatagcatcagttggcgtcataacaggccagccgttcaggcggtgacaccagtcggcggcggacgaggcggccggtcggtgaaagcgtagacgcccaacaacggcagcataataggccagccgtgcaggcggaaacaccagtcggcggcggacgaggcggccggtcggcgaagacgtagacgcccaacaacagcggcataataggccagccgtgcaggcggaaacaccagtcggcggcggtcgaggcggccggtcggtgaagacgtagacgcccaacaacggcggcataataagtcagccgtgcaggcggaagcaccagtcggcggcggacgaggcagccggtcggtgaagacgtagacgcctaacaacggcggcataaaggccagccgtgcaggcggaaacaccagtcggcggcggtcgaggcggccggtcggtgaagacgtagacgcccaacaacggcggcataataagtcagccgtgcaggcggaagcaccagtcggcggcagacgaggcggccggtcggtgaagacgtagacgcccaacaacggcggcataaagaccagccgtgcaggcggaaacaccagtcggcggcggcgaaggcaagccggtcggtgaagacgtagacgcccaacaacggcggcataaaggccagccgtgcaggcggaaacaccagtcggcggcggcgaaggcaagccggtcggtgaagacgtagacgcccaacaacggcggcataataggccagccgtgcaggcggaaacaccagtcggcggcggcgaaggcaagccggtcggtgaagacgtagacgcccaacaacggcggcataataggccagccgtgcaggcggaaacaccagtcggcagcggcgaaggcaagccggtcggtgaagacgtagacgcccaacaacggcggcataaaggccagccgtgcaggcggaaacaccagtcggcggcggtcgaggcggccggtcggtgaagacgtagacgcccaacaacggcggcataaaggccagccgtgcaggcggaaacaccagtcggcggcggcgaaggcaagccggtcggtgaagacgtagacgcccaacaacggcggcataataggccagccgtgcaggcggaaacaccagtcggcggcggcgaaggcaagccggtcggtaaagacgtagacgcccaacaacggcggcataataggccagccgtgcaggcggaaacaccagtcggtggcggtcgaggcggccggtcggtgaagacgtagacgcccaacaacggcggcataataagtcagccgtgcaggcggaagcaccagtcggcggcggacgaggcagccggtcggtgaagacgtagacgcccaacaacggcggcataaaggccagccgtgcaggcggaaacaccagccggcggcggcgaaggcaagccgatcggtgaagatgtagacgcccaacaacggcggcataataggccagccgtgcaggcggaaacaccagtcggcggcggtcgaggcggccggtcggtgaagacgtagacgcccaacaacggcggcataaaggccagccgtgcaggcggaaacaccagtcggcggcggcgaaggcaagccggtcggtgaagacgtagacgcccaacaacggcggcataataggccagccgtgcaggcggaaacaccagtcggcggcggtcgaggcgagccggtggtgatgttctgactgatccattcctggagcgtaagagataagcttaaagccatgaatcccttttatgcatatctggatctagatcctgcagaacaaacatataggatgagtagtatctgatataaatataatactcgagaaaaaatcaagtattttaaaatatttataaatatgtatttctcctcttgtcaattttgatttccccgagcagatgactctgtacgtttaaacactctgtccgactagtcatagcccccaagcatcgggagtcggtctaggcatttcccaaacatgcatatgattgacatgagttcgtcattaatggaacaaagtttcacggatcagaatttactactcaggtacttttgcaattattaagagcagaaaataaattatattatctctatgcttttgatttcttccgagtaatacttagcaccttgcgttactcggtccatccaacgagcccccgggtgctaggaatcggcccaaaggcaaccatccattggcaaaccaaacggaaagcataggaagatagaactccataactcgataggtacttttgtactcagattatgtcgcaagcaatcaagataaatattataaaaaatatgatataacatctgtagcccccgactcactactcaatggaagaccaattggtgtagtgaggcagaggaaaaggaaaaatatcatataaagaataaaataaatgatgacttagctttgtaatattccccttggtgatggcagaagtggccaatgtgggaacaaagtcgtccatcaataacaatgaagacaccagtcggcggcgacggaggcaggccggcggtgaagtcgtagacgcccaacagcggcggcataatagaccagccgtgcaggcggaggcaccactcggcggcgacggaggcaggccggcggtgaagtcgtagacgcccaacagcggcggcataataggccagccgtgtaggcggaggcaccactcggcggcgacggaggcaagccggcggtgaagtcgtagacgcccaacagcggcggcataataggccagccgtgtaggcggaggcaccgctcggcgacgacggaggcaggccggcggtgaagtcgtagacgcccaacagcggcggcataataggccagccgtgtaggcggaggcaccactcggcggcgacggaggcaggccggcggtgaagtcgtagacgcccaacagcggcggcataataggccagccgtgtaggcggaggcaccgctcggcgacgacggaggcaggccggcggtgaagacgtagacgcccaacagcggcggcataataggccagccgtgtaggcggaggcaccactcggcggcgacggaggcaggccggcggtgaagtcgtagacgcccaacagcggcggcataataggccagccgtgtaggcggaggcaccactcggcggcgacggaggcaggccggcggtgaagtcgtagacgcccaacagcggcggcataataggccagccgtgtaggcggaggcaccactcggcggcgacggaggcaggccggcggtgaagtcgtagacgcccaacagcggcggcataataggccagccgtgtaggcggaggcaccactcggcggcgacggaggcaggccggcggtgaagatgacgatgcccatcaacggtggtgtgaccaaccgaccgtataggcggggacaccagtcggcggcgacggaggcaggccggtggtgaagtcgtagacgcccaacagcggcggcttaataggccagccatgcaaacggaaacaccagtcggcaagagtagtgccgcggcgttacatgcaaacagcagaaaataccaagagagattaatctgacatttagagatcaatctaataaacaacaataagttgaaaaggaaaaaacccggcgaagtcagagattaaaaggaaaaaactcgccgagattgatctcttcgactgactctgagacggagcggaggaggcggaggtcgcagtcgcgggcggcgttggtgtccatcagcacgacgcaggacggcaggaaggcatcggcgtggctgcagccatctcctatgcatccgattagatcggttttggcatgcttcgtgtttgtagatccatcttgcaacaccatggcatcctcgttgggtagattggaccagtaggcttggtggtggacgaggacgaccatcaaatccgtcgaactgtcgttgccccgtcgttgccgtcgtgctgatgcgaacaagatcaggcagagaatagcagcgacgattcgtcttgttgaagtcgtcggcggcaaggaatcaaggagctcccaaagcgaagacgaagccggcgactcataaagttgattccatcgcactcgtcgtcaggaaactcggcgtttacccctacctggcgcgccaactgtcgaaacatgaattcggcaataataaaagggggtagcgtacgagacctaaaagtggatggatgcggagacaaaggatttagacaggttcaggccctctcaatgagaggtaataccctactcctgtttggggatttgaatccaccgggtgtagtattgatctgacgatcaggttgtgtcatgccccctagagggcctcctgcccaccttatatagggtggggggcaggattacaagatagaaaccttaaccaatacggtatcggtttcctaaatctactttacaatattatcaaaccaggactttaggctgttccgtaatatataaggaaacgtaatacccgagttatgatctattacatattccatagatataagttatcccctatgactagtcggataaccatgctgtatgggtatggggtacccataatatccacaatcgtcaactcgtaaagtgataaccagccaaggaagatgcagaataaaatgggtggcagatctgttggatgcaaacacaaactggaatgagcaattagttagacaaatctttcttccaatggatgcggatgctattctgtccattcgcacatcacgccaaggggaagatgatttcttggcatggcacctggagaaatctggtatttttacagttaaaactgcctaccgtttagccattgaaaataagctgaattccgaaaatagcaatgcttctggcagttcaattgaggggagtaaaagcttatggaatacaatatggtcttgtccggttcctccgaaggtacgtatttttgcttggcgagttgcttctgactgtttggcaaccagagtaaataagaaagggaggcgcctagaagcactggatacttgcaccctctgcggaacagaatctgaaactgcattccatgccctttgccgatgcacttatgcaagggctctatgggcagccttgcgcgaggtgtggcagatacctgaccagacaacctggacatatcaaggtacgaaatggctgctgcttacacttgttaaattatctgaaatggaacgaatgttcattctaatgttgttgtggcgtatttggcatgtacgtaatgaggtggttcatgataaacggcctgccccgattgaggtctccaagcgattccttgtaagctatgtggactctctactgggaatacgtcaacacccaacaaaggatatacacaaaggtaagggagtcatctgctaccagctgcggaattcatcaagacaaggtggttcagagagatcgcaggggacagacgaggcttgggtgaggcctccaccaggctggtctaagctgaatgttgatggttccttcaataacagcagcggccaagcaggcatagggatgatcctcaggaattcagaaggagaagccatctttacaggccgccaggctatagcaaattgtgttgatgctttggaatcagaactactggcctgtaaatttggtctggatttggctctacattggtcgattctgccaatcatccttgagactgacagtatcctggctgtctccgcgattaatggaaaaactgaggataaatcaaggtttgcttacttgatacgtgagctgcgtttgctccagaaaggagaaagggaagtgaaagttcagaaagtgcatcgagatcataataaaattagccatgttctggcaaatagtgctcgagtagcaaataggtcagacttctggtttggccacgagagcaactgtgtctctgcactcattctggaagattgtaatcactcttctatagattaatgaatccccttttccccgcaaaaaaaatattttacgtacttctgaccaaatttaggtagcttcctttgtttaatttgtcatggactttttatcttgtatttcaataattcattgtctgaatttcagctgttttctaatttgtgggtttgttcggttgcctgatacatgcatgcagtgctacatgaccaccagttatagcgaacgaactaatcacggcctacgggccagggcatcgttgtaaccaacggccgaacatgctagtgtatgtattttgacatggtctcttcagtattaatctagaccattttaatttgaacatgccgcacaaccaataacttttttttcattttctttgaaatgcataataatttatacccctttgagaacaagtttgaactttgaaggcttattcacaccgtgataatatatgaatatgaatatgaatataatagctaaaagtaggaaacgagcaccttccaccctctatataaagacaggcaagaggtaccacgcaatcgaagatcaataggaggaatttgtcaatttgggtccaggaaaacgagagtagttcatagtcatttcttttttgcatattcacatttttttcgaaactcatattcatcgatattatagcacccatgaacacttctaggttttttatacggcaatttggtaatctcctatgagatatctacaaaattctggtataactggttttcttctcacacgagaaaaaaagcactccacattctagttagatggcttaacttaaactatttcaacttcgggtgaactgtgcatatgtttagttaacgagtgattttttttttggccgaggaaactgtttggtagagctcaaactgctaaatttagtttcaggagttgagttagttgtggagttgtggagctgcctaaactgggcctatttggcacaactccagctctagctgcacccctcctactccaactgcacccctcctggagctagagctcagctaaacagtttcagctccacaaaaaatgggaatagagctgggtttaggtagctccacaactccattccagacccaactcctagagctaaatttaggagttggagctgtaccaaacaagccctcagctccacctctctagttcattttgtgatagcgctccacctagctccgctatcattttaggtggagctgaaactgtttggctaggttccaactccagtagaggtggagctggagctgtgccaaacaagcacagaaaacatgagagaacatacaattctcaattctttctggttaaatgtttcgacaatataaacacagcactctcatctagtgacatgttgcatgtagtattaggaaaagacatgcacaggggcgacatccaaacagatgagaaaaatcaaaggggtgaaaactcagtgatttactacggtacaccgtacaacaggcttcacaactggcaccatatgacgccacggcctttactgatttagcataccagcatggtggaaggactcatgagaaaagtatccaagtctcaaaacgaaagcatgttctagtttacagcagtaacacgactatggcaccaacgacgggggaaagagaaaaacggcaatacagtctcatacagaatgcaacacatttgcttccaggaaaagaatgacaagaaaatggttgaccatcgccaacgggaaggaattgtaggcagaggagctgtagcaaattaacgccttttcgctcctggggattgcagtaaccggcctgtgtttctcagagggctcgcgacttgacgatgtccatgctcatctcactcgggtcagtggcctgcagctccacctggatgccgtccagctccctcttgaaccgatccttggagctagcatacagcatcttgctcctcacccttgatgtatcaggagccctgcagagagtaagatgcacaaacacattgcctcagtgttacaattgaaatagcattatatagttctgttacattgggcgtttgacaagctgatggatataaacatgttttatgatgcttacagttaataatctaactgtcatgatttattcattattcaaataaagaagaaactggtagtgccaaacagcttgcagtgtttagagacataatcctgagatatgttgattaattcctgaagttatcgatccacaaatccaacatatgggaaaaagatcaattcagtgtctgtcaggctgttatctgtaattgtaatataaggttgctttacatttttttggcaaggaattcaattttctttacatgctaatatcagtttcttaagatccatggcttgggtgaacagtgaaacaatgggcacaaaagagctttagcagaaatgaccaaaagcagcattgttcctttagattattggcactgttcattgtctcactgacctcatttccctatcaaaattgttccttaccgtaaaagtagataatatgtctaataatcactagtggcagtgaggcattctcataaaaaagaacattttaagtacaggtagcgaagacattagtgctgataacaattttgataagcaaagagatgcctgatatcaaagtgtctaattttagatctatgatgctatttttagctaaaaattgataggctaataattatgcctctttcttgttcctgtttcaacctaatctaagctaattttacacttttgtaaaatagaaactatgaaatatatttctgcgtttccctttgataatgaatttgaagtgctaatgtgcttttgaacaagtgacaaaagtgcagttaacccatcctataaaaaagtgtttcgttacacctggtaagtctgaagatcgaagggaacaccaaactgcaataatctaacgtaagcaggcaattgctcacaaacaactcaatccaaattgagacttttaggtcagtaactgccacacgtaagatcgaaacaaaaccaaacataaaaaatatgctatgtaaatagaaatttacatgttgatgaaatcaacaagaatatgacactatgttgacaggggaattgttaccaggagatgaagaatatcttgctcttctggcagttttcatcagtgacaaagtcaaaatcaaataccgcgtagcggcactcatctgctggtaagcaggcagtgaagtcgtcatagctctcacccggctgccccaacctgtccaccaccacctgctggaccttctcattgatcttgaacacgatgaagcggaagctccttttcgccttaagttccaggaacttgagtttgcattcgtcacacacggccattcccgacgccgaattcgacttacatatccccacaacatacaccatttcgttaatggacagatcttgatcaacattctgaacgaaagagattgaactgcactcaccatggttgatgatccttttttttcctcttccttccttctttccttccttactatggtgagaaacagacaggccctgcaaggaggagagaggagggaatgtgccaaaacgcgagcaggagcaagatttgaaggcctgaaagagaggaaggaggaggcaaaatatagggagggaagggctggcggtggagatggaggcttgcatgatgccaccacgttcggagaggagcatttgaccaagcacgtcccctccttggtgtgtgagaaccagaagcgttgtgtgcaaccaacatgcgcgccaccacccatcgctatagcagctccccttgcatagaaaaatcatttgtggcatcaaaacaacatggcgtgagtttgatacgtttcccgtttttttaatggtgcaggtactcaggtactccacgtctctagtttctttggtttgattccaccagtaagatccacatgtaatcttctctattgtaagggaagactatttattaattccagggcaacaattagttttttttcttaaaattttagtcaattttccaactgatagaatctgcataaaagatgaagtgctttgatctatctcatataagtacaaaacttacattctatggcattgctgttcggcattgtacagatcttgcctcaaccaaactagatcctggttcttttaggaggcccctttccaccatcattctccggacatcctgaacatccctccatctgtcagctgcagcatatatgttaccaagcagcacgtaactcccagtgttctccggatcaagctgaaataatcgctttgccgcaacctccccaaactcgacattcttgtgtagaacacaggcaccaagcagagcaccccataccgaggtgctcggctcgaatggcatatcttggatgagacgatgagcctcctcaatcctcccagcacggccaagcatgtcaaccaggcacgagtagtgctcgccatttggcatcaaaccatggacgttgcgcatgtccttgaacaccttaatgccttcgtctatcatgccggcgtggctgcatgcatacagcaaagtggcgatggtcacagtattcggcttccctcctgactccaccatcctgtcgtagagcaggatggcagttcgggcgtgaccatgtataccgtacccggcgatgatcgttgtccaggcaacaacgtccttctcaggtagccactggaagagagcccacgcagcatccaagtcaccagccttagaatagacatcaatcaaaccagtggcgatctctgtgcttctgaggaatccgagagtcagtaagaaacagtgaatgttcttcccttctttcaggtctgcagattctgcataggccggcaggatgcttgccattgttgcagagtctgggcgcaccgattcagcaatcatccgcttgaacaattctatagctttcttctcccgtccactgacggtataaccagacaaggctgcattccatgtttctgcacgccatgagcccctctcaagtgttaatctcatcagcttcatcttaccgcacctcgcataagcgtcgataagcgcagtttcaacagcaatgtctgatttaaggccaagtctaatgcagagtgcatgtgtgcacttggcatgcttccctgacggcatgctggcgcatgctgagagcagatacaccattgtcactccattgggccatgctgccccagacatcagcatctgacaaccaagagaaatggcctcaaaagcacggtcgttcagcacataagcgccaatcatcgctgtccaagaaacaacatctttatcatgtttgcagtgatcaaacacccttcgtgcatcctccaagctcctacacttcccgtacatgtcgatcaatgcgttcttcactgcaacataatcccccaagcctttgtcctcaacaagccggtgcacggctctcccagtgttcaagtccttggcttgcgcacaagctggcagcactgacacaaccgtggcacggtcgatcccgacaccatcagcggccatctcgccgaacacttccagcgccctctccgcgtagccgttcttgacgcacccggcgatgaccgcattccaggacacgactgtccggttccgcatcgccccgaacaccgcctccgctgcgcccacgtcgccgcagctcatgtacatggaaatgagggcgttctgcacgtacgtgtcgccgccgaaaccagcggcgagcgcgcggcagtgcacggcacgcccatggcggccgagacgaaggccggcgcaggccttcgcggcgaaggggaaggtgaggtggtcgaaggcgcgcatcgccgagtaaaccgcgagggcctcccggtggcagccgaggccggtgtacgaacggagcagtgagttggagaaagaaaccggtggtggttggggcatttgcgcgagcaggttgtgggcgctggagggacggccacatgcgcaatacaccatgaagagcggatggaggccgtgatagcggaggaggtggccggacgtgaggaggagcgcgtggagttgagcggcggcggcgggagcaagcggagccgtgttcttcgagtggaagatggtgacggcgaggcattgccggacaagcgggctgggtttcatccaggaacggagttgagacaaggggatgtttcggcttttgggcagattggcttctttcagcctcggtctctctcggggatagttcgattttgaacttttgggagaaaaaaaatcagttgcaaacttctaaaaactaatttgaagtttgactgaattttttacatattggtccttttataaagcttattttagacatggatactaaagtaggcagtccaccttgcagggcagtcgtcggaagaagttcgccacaacgtcaggcagcctctgccgcagaatcgggtgccgcatcaggtagaaaccagtcaacagcgccaccgcctggaacggcaccgagaacgtgatcacggcaaggcacaggcagcccagcaggtacaggcccgtggcccgcgggtcccgccacgtcatcacgcaccgcgcgcgctcggcgtgcgtcgcgatgtcgccgacgatctcctgtatccgcgcgttgaggctcctcagcttgtcgtacctcatccgcaccacctcgggcggccgcgccgtcgggaactcgtcgaactcctcgtcgagctcgtcagggtgcgccgtgtcggcgtgggacaccctcatgtcgacgtgccacgggtgcttgggccggcgcaggtagttccgcatgccgagcatgaacttgtacaggaagaaggtgggcagtacgagtctcgggtagcacacgagcatggtgaagatgacgtggaccgcgacggtggtgaccgggttcgtccagcggcagacgtggtagaaccacgcgctcgccgcggacaggggctccagcgcctccgcgaggcggaagaagtgggccttgctgcgccgcatgctccaccgcagcgcgtgcgactcgcagaggtgctcgacgcactcccggcgcagcggcgggtccatccgccccatccggtgcgcgatgatcgtgaccgcctcccgccgcagcatctcctgctgcacgacggtcagcggccggtggtagtgcatcggcggcagatgcggctgcgcgtacgtctggaacaggcccagcgtcgacgtgctggagaaacggacggcgagacgaagctcgcccatcttcttgacgccgccgccgtggagggacataagcgggtaggcgtaggcgtatgtgcggccggtctcgagcgtcgagagccggatccgcaccttgccgaggaggacgtccttgacggggtcgccggccacgaggccgcccttgtcgcctatctgagaattgtggaagacggcgacggtgagcacggtgcagtggtcgtgcacttcccagtggtactgctggtggaaacgcggcgagatgctgtcggtgacggtgcgcgtgcggtaccacttcaccccgtacttggcgacgcagtacgcgtcgcaggagcctcggccatcgcgcgtgcgcgtcgcggtgaggatggcctcgcggatgccgagctcgacgaggccgatgcacttccgctcccgctcctgctcacgcgccgccggccggacgtcgctcaggtagtggaccggctctgacagcaccttgtacccgcattcgaggcaaagaacgacgcttatcttggcagagtacttgtcaatcttggcggctccctctggctgcatcaaactaaacctgtcaaacagcatttgcgtagcagttagctagggacaaattcaatcttgcttgcctaataccaggtactttgtcgttctttgctagtacatgagatggatggacaattgggcgtaccatcttgggctaatcgggcgggcgtcacaccggcgttcgaagctgtcaagcagaacgttgacatggccgatgacctcctccttgccgttcttgacgcccacgacggacatgttgaggtagtccttgaacggcgcggcggccacaaacaggtgaccattttcctcgtctttccagcggtggtccatggacgttctcgtcctgtgcacctgtcccagtatgcgcgacctgacgaacacctcaccgacccgggccttgtccgcgaagacgatgtcgcggacctcggtgaacttaacgcgcacgtagcacaggcgcggcacgtcgtaccgtatgtgcttgatgtgcgccgcgagcttgtcgtccacggggaacgcggcgtccgcgtggacggccgagtcgaagtagctgtccttctgcgtgccgaaccacacggccatcatcacctcgccgcggaactcccctttcttgtcgaagacggggtaccactgcggcgcgggcgagctgtcgggctggacgctcgccggcgcgtcggggaggatgcccaggtcaaggcgcgtgctgccgacgtagtcgtccttggcgaagccccggccccggacgagcacgtccaggaacggcgcgtgtatcctctcccgcgagaacgcgaacacgtcgtcccactcggggctcgccgtcttctcgacgtggcgcgtgatgcaggagtagcccccaagcctcagctccgcgaacgggtcgaattcgccgctccacttgagcccccgcgccttgacgacgcgcacgtacaggtactccatcctctcgacgagctcgtacgccccgccaggcccggagcaggcgaggccaggcgtgatctccctgatcccgaactcattgttcggcggcagcatgccggcggggcgggcataagacctcggcagtacgtcgcccatgtcggcgaacactgccgccggtcgaacgagatatgctgggctggtctggtcacactagctggtcagtgagcaagttgcatttatatatgtgtgttcagcagtctggctggccaccaaccggccgcgcgcgtgacgtcgtgcgtggcgagcgaatgcgtggatttttgggatttggtgatcgacacagtcggggtgtgtgcttgctgacggacgattggtgatccaccagggttagttagagtaagtcccagagcaaacagacatgacatgttgatttacatgacttcagcagattagagaaccgtgtcacggcttcacaggcgtttataccgtttagggaagaaatcaactgatttgagctgatttgcatgaacctctaggttctgggccttgtgttctggcagaataggccatggcaggacaaatgctaacggaataagctcactttaggtccctcgagttgtcgtcgagtctaaagttcgtctctgaaccgcaattccagatagatatatatgacgcgtctcttaactcctaaaattagtgcaaataaggttctaaggtggtttggacatcgtttctcgatgacatgacgttaacgtggcacttaaagctaaaaataatgtaacacccatacatcagtgtttggttaaaaataaaaaaccgcgaccggacccacgtcatcaacccctatttattctcctcttctatctgttcttcatctctttgtccctttcctcaccatcgactcgtcgacagcgcacgcacaatcctgtcagaaaaccacaagtccgcaacgccgccgccgccattgtcatgtccatatccatctctgcgcccacgcctttgtgacgaaacccattacgcagcatctctgcctccattacggtcgtctccccgtcgaccgtgaccaacgctctccgctccctcctcaacgctggtgtcaaaccgggcggccaccccgctcccatgactctcctcatcctcctcctcccgtctcgccttcccccgcgtggctgtggcgccgccacctctatctggcacatcgcgtggctcctacccgcatgcatgccctccttgcagggctccgctgccacacccttatatcatcgtggctagggcttagagtgagatcttgtgatctttttatcttcttgtttgcatctatttagtcttgattaatttataccataattttatgtatttatagttttattcgcatcattttcgaagatatatgatttttagaaatatatattgcaagtaaaaatatattttattttgagggcataggttacgaagctcgtttatggccctctgaaatttagagccggtcctgctcacaagtgcttccttgaaaattcctcagccctgtaaaatcttgccaatgaaccatccagctcacatttgcatgataataatcgttgatgaatttggcatgtggcaacatcaaaaaagaaaaatcatagttgcatctgcatcatcagagcagaatatgttagtgagtagtgttctgttttttcacaaatagtgagtagtgtacttacgtggtgtttgggaaggagggactaaactaagtccttcccaaacaccacattaagcagaatatgggcctgtttggttggtgccacattttgccactcttgaggtaggttagtttgaccaaatgtagttagtgtttggtttgtttctataactttggcatgccacactttctactcttttgatcccactagtcatagacccttttcttagccaaagtttgctaagtgtggctatcaaattttaagccacacaatttgcatcttgccatacctttggtaaaaaactgtggtaatttgaggtgggcatccaaacagcccctatatgcacccgatggctcgaaagggaaaaaggaaaaaatcctgccgatacaaggaaaagaagaatgtcagcacttttttagataatgaaaaaaaaagagaatatcagcacttattaggcgagcaatagaattgcgcgcgtaaacagtgacgtgaatcggcctgaaagcccacggtacgtgcggccggcgttccgcgttccgtgacgacaatgagaatagacgcttctagaacatacagaacaacttcttttcgcctgctcgtgatgttccgttcacatttcacagccgtttattagagagagatcacgaaaaactccccaaaaatggcgtgggctacgactacgaggctaagataccagggtttatccttctcctcgttgtatctgcttgtaccgatatcagtcagaaaaaaaaaagaaagaaagtttgcactaaacgtgttttttcaattttcagtactcctacgtactccgtacagttggatgccgatcggacggcggagtgcagctcgttgacccagccgatttcgttcacacgtggcggccgcgcgacgcgggacgtggcgcggggaagcccccaccaccactgggcccaacgccgcagggcaacgcgtccacacttccgccgcgcatcgctttcacaggcaacctcaaccaacactcgggactgggagggaaggaagattttacacacaccggacttaccgctataaagcgcgaaggccccccatccacgatgccgtctcgcaccgccccgttcatctctcgcctccggctcctccgaaccgccgccgccctctccccgttctcgtcctccgcgccgccgcggcacagcccccgcatcctccgcgctatccctgtcggtgcgcctcacccgccgcgcgtctccgcagccgtctcgccgctggtccgtccggtcgccgccgggttcgcgctgttcagcatggccaccgccgcctcctccgccgcatccgtccacgacttcaccgtcaaggtctgcactgcctcctgccctcctcaaaacttggacacccctttcccctctggtgatttggtcccctttcagcagcgagagactgaagctttatacccataccccatacccctctgggggaaagtatttgcacatcgatgcctccgtgatgctgctacgattcggcccttttgggacttcttaagccaatatctttttggttttagctgcagatttttttacccaaatctttggaggttttctacaagctgttatactgcttgaattgtgatcctaatgtttaaaggactatgctttttggtgtttgcaggatgcaagtggcaaagatgtggacctgagcaccttcaaggggaaagtcctccttatcgtcaatgttgcatctcagtggtaccaattattaccaatccctcacctccacagtgtctacgttttaattttgtaaacttggaaattattctagaatgcataatgtgatttatctttttcatgttgaaatgttccatgaacaacgaaaccttggaaccctagtactgcgttatcaagcgcttaagttgaatgatatgctcatttgatgcctaatataatgtatattttcgatcaaacttccattcatgttgcaaagtaaagatgccgaatttatatggtttcatatggaacacattcgagtttctatctaggccatatgagacaaatcgaaatttgaagtattgttctgctaaatgaaactttaaaaagagccatggtagtgtttgtcccggaggatcagcctttgcatgtagattatcgatatatggaaaaaataataatctggtcagcaggtaagttggttttagctggacaacaggatgttgatctcttgccaattggaaagtttgtgcagattgtcataccattaactatttttctatttgcgtctcatcctccttgtgttaagggatacatgttctttagaggacggccattttttttttactaattttaaagaccaatgagatgcagatataataaaataacatacaaactgatatcattatcctcaaattaagaaatcttgttgctctctgtcattgttgcagtggcttgaccaattccaactacacggagctgagccagttgtatgagaagtacaaggaccagggtgagtgttagatgcatctcatcatttgttccctcattatgaaatctctcttgtgcgctgaattgctcatatgttctttcatttggagtttatgaccaaccaattgctaatgtcattgtcaatttgatttgacgacaggttttgagatccttgctttcccatgcaaccagtttggtggacaggaacctggcactaatgaggagattgtccaatttgcttgcacccgcttcaaggccgagtatccaatttttgataaggtaaatttgggcacattataccactacctcttgcatttttgcactttttttttcatttatctttcaagcggaaagaaacaactaactcaagtatatgttcaccttccagagccgtcataatattttaaaggaaattaatcccattccgaaagtgttccctttcatatgtagcctgtgatgtatttccagatacttgtctagtacttaaaaggaaattgatcaagtccatgaagtttttatccgattcttatgcatttcgtatgatgtatgcgatcgataagcctgataccagttttatcctttcatttatcacaagaaagaatcatggatgtttataatgtgatgatcaattgatttttattgtttagagaggtgagatctagaagttctaactaccattatcttaataggttgatgttaatggtgacaacactgcacccatctacaagtttctgaagtccagcaaaggtggtcttttcggtgacaatatcaaatggaacttctccaagttcttggtcgacaaagaggggcgtgttgtggagcgctatgcgccaactacttctccactcagcatggaggtaaatcccgagctccaagtgggtgtaatttgagttccatctcatcaagcttccttgccttcacttacagcgattgctttaatcatattacagaaggacatcaagaagctgcttggaagttcttaaaaccttaccgccggcgccaccagatgcactgctgcgttgcattgagcacttggaacttccaataatgttgtaataaaactgtgcttggaattgctgtattttcatttgcgtagccctgctgtgtaatgtataaagtattaacgtgtaatgaaattggcttactgcatcactttgcccctttattgaaatattatctcctgtatctgtgttcgttattgagacctgcgactgcgatgagcaagttttgacgtgtaacgtgtactcgttctatctgtgcatatactgttttattagctttgtgctgtggttacaggtttgcagccaacaatatctgaaccttggcatatttgacaaggtctgacaacaatctctgaaacttggcatatttgacaagatttgaggagaagtttttccaacacaagtacacaacaccccaatgttacacatgactcaaactatcattacttcttttatcagcaaatatcccaaattacctgcaagtatctgctactctgaactttacggaccaagataaaatatcacgttatgtcgtttctttgtcaaattgaatactctctatgttgtagtatcaccagtacattttgtttacaacttggtttcatatatctcgtaatagcattttctcaagtcgggatatttgcaatgacatgaatctaattaggtctggtttagttctcaactttttcaaacttctaattttttattacatcaaaactttcttatacacctaaacttccaacttttctatcataacattctaatttcaatcaaatttttaattttaacgtgaactaaacacacccttaaccttttgtcaaactgcctcggcgcccgcggggtaaaggagagtagtcaactggtcgatcgatctgccctccgtcgacacgacgacacctatccatccgtctcggcgtccgctgttccgcctgcgccgtagcatcgcgccgatatccattacgctactccccttgcgagttgcgactgcgagcaggcggtggcgccgagcccgtcttctcggcctcgactcccatctcctcgctagttctcacccgcgcctgcgtcgatttccatccatcccgcgaggagagcttccatccaacggtgccggcttctctaaatacaagctcactcggtccggcccacacaccccaactcggcacacatcttccaagtctccagcgaagtctcccccctccctcccactcgtgttcggcatctcgacggcggccaggccgccccaaaacccacgcggatccctcttgatgcaggccgccgcgtagcctgtcggatcggagcggcgaggcggggagggagggacccggatcggcggggtgcgcgtgctcgtaccccccatggaggcggcacgtggggcccgatcccgggttccggtggcggcggtggtagcggtggtgctcgtggcagggctcgccgcgggcggctccgcggctgagatccggcggcagaagaacgtgcaggtggcgctccgggccaagtgggccggcacgccgctgctgctcgaagccaggtgagtggttggtttgctcgatttgctggtgtatgtggctctgtttggtcgagagatgtcaatttgactttgattagtgtttctcatttgaatctgatatgtgagggtttagcattgagaacctggcgtatcgcaaaactgcgagcaagccattcggttgatgtatatatatatattttttagaaaaaatagagctgcccaagtagaaaacacgccatgcttagctgcctgtttctcacataaaatttttactagtactgggatgatgtggaacgggatctgtacactgacacacctagattctgaattttgattggtcaccagtacacttttcctatgtttaaatcgggtgattttgcggaattgaatcctcataaattatgaaattatttggagcaaaattttaggtttatgaggtttttggtaccatgttattttttgctcgctcgctattgttctgcatttgaattttgtggccgcttcactgcttgtgtgaaattgaattttattttaagtattggactagtctcaagttgttcatattagtgaataatgacactatacttggtgtattttttgcaaccccagtaatttttgtacaactcaagtgctatttatgtatacccaaattctggctgctactgattttatggtgctctggacaagccagtgtatttatcttagctcaaatactacagaacttatatatatatatgtatatatatatataaatatatataaatatatataaatatatataaatatatataaatatatatataaataaataaaattaattaatgaatgcattttcattgtaacgactaatgctggtgggtgcaagtaaatactgtttccctataagctatatgcttttcgtgtaaagtgtaaacataaacattcagcttgtatatgagcacttcgcagcagtggtaacctggttaatgttacttgttattttccaagaggtacttaatatatcttatgttctcgcttttgttagtgaactgctttcaaaagaatggaaggatctattttgggattttattgaccattggaaggaactcgataaggcatctgaatgtttgacagccaagtgttgtgttcacaagattgttgaggatgcccgctcatttctgagtgagccactggcttcaatttttgagttctcacttacccttcggtcagcatcgccaaggttagtgctctacaggcagcttgcggaggagtcattatcctctattcctgttaaagatggcactttggagcaaacctctggtcctagtactggggaaaattttcatgaggctgttaaaggaacttgctgctgggtagacacggggagtgctctattattcaactcagctgatctacgcaaatggcttgatggcttgggcaaactgtaagtatcttctgttcttttttttgatctctttgttagggctgtaaatgggcaactgagaatatttgctgagcagagctgtggactccactcaacaacctgaactctttgagtttgaccatatatatcctcaatcaaatattactgctccaattgctatattttatggggcttttgggacaaaatgcttcaaagagctgcatgttcacctggcagaagcatcaaagcaggtaaccgttctccaatgtatttaagagtgtatgaaatcctgagcaaacaacgagctctagaaagtagagggataaggtccataacattaccatggcattgcatattaaatttctgttcccatttactcatgattcttgaactctttcttttattatttcaaaaggtattttattgttttctttggctattgcttctgttctatagcttttctacgtcatacataatttcctttgctgtagctctctaatatgcattatatgttttttctagggaaaagtaagatatgccctgcgccatgtcctgccatctggatgtcaggctacatctagcttctgtggttctgttggtgctatagatgcagtcactttgagtggatatggtgtggaacttgctctcaagaacatggaatacaaggccatggatgacactgctataaagaagggtaacactcccatgcattttatcactcctcacccttttttatattaagaaagcaaatctgttatgaaattctcaagtaaatctgcaccagatccttttatctgaaataaatcaataaagtagccaataaggaattatattatattcctcttcagtttggttgggtggattatgcgttgttgacatcatgaagacccgaactttattgcatattttatttgaaatactgaatgaacagcattttccactcccaggtgttgctctggaagatcctaagactgaagacctcagtcaagaagtcagaggatttatattttccaagattttggtctgcttctttcagtcaataaatctaaccacatggactttgatgtgatgcacaaatggatggtattgacaatatctttttacctcattgtgcatccaggaacgcaaaccagcgttaaatgctgagataatgtccttcagggattatctgttgtcatcgacagtatctgacacacttgaagtatgggaactcaaaggtagtgttgtgataagctgatgagcattcctgacacttcctcatgattctatttttattccaatgttttgttattcaatggtataagagtgcctttttaatttgtgataatctccatactgcagacttgggtcatcagacagcgcagagaatcctccatgcatcggatcctttacagtcaatgcaggaaattaatcaaaatttccccagtatagtttcatcactgtcacggatgaaggtggatgctttttctgagctcactttagatgtctagatgtgctcataagcaatgaactgttggttatatatatgttttgttggggagatgaaaattttgtttttgaatacattcgtatgaactatttctgcatgaagaatattaatgacgatttcatgtttgtacagcttgatgattcaatcaaggatgaaataattgcaaatcagcgaatggttccacctggcaagtcattgatggctttgaatggtgctttgattaatattgaggatctcgatctttacctgtatgttacactgtatttccgagataacaatgtttctgattatttaatatgttttcccactttcattagccaagtaaattagcagatttcttcttgtctgatgcacaccaaagttgattatttccttcacacttggttttggtgtgaatcactgtattctataacactttgcaattaactcctctacaccacctgttgttagaaaacatgctacagagcaaatggtaactgtaaacctacgacgaaatgatattctacaattcaacagctgcctggagagattgttgacaagaataataacacaatacagcttttatatggtgttagtcatttgatgcataagaagataaaagtccaatcagttttatagttgcgcatgttgcaaatattcagtgcatcacattgtttgagagttttctcctcaatctgtttgctcatataggccatacagatttttatttgtctggacataataatttggtatttatcctgtttctcacatttcccgaacactaaatttgcatatttaactaatagagcacacatttccgggaacctgattctgttttgctaactttagtaattcatctatcttaaaattgttaccagatttctgactaatatcatactctatttaactaatagagtacacatttgattctggtttgtctgacaggttgatggatatggtccatgaggaattatctcttgctgatcagtttgtcaaactaaaggtgaattttgataaatgtgctattaaacatgtttaatgggttgtccttggctccttccaagagatttacttttgatggttgttcctcttaacatcccagttatgaggaatgcatgaacacctgtctaccagtgttgataattcgaacctgttggaaaaaaaaactagtttgacaacttttggtgaaatgcaacgcctaagtgtgaaatgctgtataactgcagaatacaccagattgatgatatttcttggttatactcaaataacatatttgtttctaattgctttttttatgataaatgttatttaagttcttaatctcttacaatgttggatatttatggtgtggactgtcaagttgtgaaatcctgcaccaaacatatttgcctaaaaactattattttcttttgtttcatttgtttatagggaatacatttttatttactttcttatgaggtgtaacttatttcgtaattaatttcaaatgcctaccagattcctggaagtgctgtccacaagatcctgtcagctgctccaccaacagaatctaactcgttccgtgttgacttccggtcttcccatgttcattatcttaataacttggaggaagatgcgttatataaaaggtggagaagcaacatcaatgaggttttgttcttttctcttttattaacaccattgaaataagattgtcattagaatgttgctttgctgtgccaagtcaaatgagggactacaaccttctatttccaaggctttaggaattactagagaactaagaatatatccttatactcattactccctccgtcccacaatagttgtctttctaggttgattagcatagattaagatttgagaagaaaagactataatactataataccccttatttgaatgggagttggaggatgtgcaagggtaaaaagagaagaaatttgaataggagatgattgatgggactgctattactcaaaagtgacacctatttgggacatattttgtatcctagaaagacaactattttgggacgaaggaagtatgaaatagatatcttgcttgacaacactgatatcctgttttggtatgataggttcactattaattctcaagcttagctttccatggctgatatatgtcaacagtatatcttaatgttttttagtttgtactactacaaaagttcacgtttaccatacatgtgaaatctaaatattagtggttttgcatatgctattcaacattggttgcttgtgttttcttttctgcattttctcgttttcgagaaaattgtatgacgcaactataccaaccttaattaattactattacttactaattgtttcttcttcctttgcagctattgatgccagtcttccctggtcagatgcgctacatccgcaaaaatctattccatgctgtttatgtgcttgatcctgcttcagtctgtggtgcagaggctagtctctttcttaccttccagttttatgtttttgtctttttaacctggagcctttttctaactgggtgtcctgttgccatttctctttaaatctttacagaccattgacatggttctatctctataccaagatagtgtccctataaggtttggcattatattgtattcttcaaggcttattagtgttattgaagaaaatgatggcaatcttccagtaaataatgggtctaagactgaggaggatatttctattttggtaatcattttttttaatttactttgaattcttgagatcattgtttgatgtgtagagcatgaaactggtgttgcattataattacttgagttatttaccttatattttcattaaatactactaatgctcgaaggaatcaagtgtacattacattatacaatattaaaggggcgtcctatatttaatgtaatacacattttatgttagtctgatgcctatgtggtcctttttcttttttcctgttgataaataaacatttacataccgtgtccttgcaacctacatgttctggtagttccatttttcgtgacttaccattatgtacatatgtggtgcacacgacccatgttttctattgataggacgattcacagcataataagattataattttagggattcctagtaacagtatattgcaattagtaggtccatgtaattattctgaactggaagggatacacagcagcagaagattacagttagtatgtcctatgtactattttaaactataaggggtatgaacataagaaagggaaatctatgaatatgcgtcatcgtacaatatgatgcagcacatttcctagtggtgttgactagtgagatggattataaccttaattgcctcataaaaggaattgatgcaccatgtttccctttttgcagataataaggctattcctgtacatcaaggaaacatactcaacgcagttggcataccagttcctaagcaatgtgagtgcacataacatatttgatttgctatttataaactagaaaattcagcttgagtggatatggtggcaaaagaaggaaacgtgtatctttcaatacttgaatatatcttttttctgtatgctagaccaatttcatgtctaaaagaatttgagctttggcatattttctcttctttttggcataaaatacagtgcttctgttagttttcatcatcctctctgccttgtgccttccatgagtgatgacatttgtgttaagttttgtgctaagcttattgtggtgtaaaaaatcattgcaaactgttcatcataattgacagagcttaaaaacatgtggaagaggtgtctgctagacttttaattttgctgaacaaccctttcaccaatttttcatctgaagtaaaagttgagatttgttttatatatcctttcatgattagttctctttctttcttttttgtttcttcggaaaattgataatggttgatggaattacatgtctgacatggctctaagaaattggaatgtagtggcatttgtctattgttatgttgcatattgatccttgaataatattgctcaggtgggcatgttacagtttccatctaaaatatcactagtgaaatcatgatcatgttctttacgttatatttgctatttaattgtcttgccaatctgtgcacactctagatgttcttcgtttcctatagttctaatccttgtgatattttcttctccagatacataaatcacagaacagtggtgatgactataatgaagagtctgtggaagctcatcatgttgaaggggcatttgttgattccttattgtaagctcattcactgaattcaatattttgttggagataattgttcaaatatatttaacatgttttccttgttctactaatatttggtaatgtacaggtcaagtgctaaatctcaccctcaagatgtgctgctaaagttgcaaaaagagaacatgcacaaacaagaggctgaagaaagttctcgttttgttcacaaacttgggttgtataaactccagtgttgcctattgatgaatggacttgtgcatgaatcaagcgaggtagttaattattcaacttaaactttggtagcagctggcctataatgttaaatttaagaacaatgacttgtctattctgcatttgtagtgctcttattttgctcaacagctatggaatatatctttctatgttataactaatatgatgtccatttcatgcgtgatatacttttttaaaggacgcaaccatgaatgctatgaacgatgagcttcctaggatacaagaacaagtctattatgggcatatccagtcccatacagatgttttagagaaatttttgtcagaaagtagctacaagcgttacaatccatcggtaagtacacagaaatctaaaaaaatatagtttgttgcctatcaatctatttaaccatagaaattttcttctcagataactggcaagagcactgagaataagagatttgtctcactagttgtaccgtatcatcagggagattctacacttcatgacattacttatttacactctcatggaagtatgcttcctacttctttggctgtatcttgtcatctaccattaatggttgttggtgctgacatgttgctatcaaatctgtctgcagctacagatgatgccaagcctgtcactcatctagttgctgttgatatttcttcgaagattgggataaagttgcttcatgaggccatacgttacctggtagatgcagaaattgcctatcgtgcctattccaatgccatttatgttgttttctcacaatagtatcttgccttttgacatgatttagatggctgggtcaaatagagctcgtgttggtctactaatttatgtccgcaatgataatccatcacctattttacatatgaaggatatcttcgatagaaccatttcatctttcaggtttgctcctcatttttgggtagatatacagaatttgtttgctttactcttaacattgcatacatctagtttgtctctgatttggatgagccaatttttgtccttagctataaggaaaaggtactggacttcctgcatgagctctgcaaattttatgaaggacaacatgtgccttcttccggggttggtgataagattagcactatgagggagaaggtgtatagcatagctgctgaaactggcttgcctgttgataattataaagcgtggtttacaagttattctcatgatgcagtcctcagaggaatgaataaggtcttgacttgagctttcctatcctttttgtaaatgtctccctttaactaaattgttagtatgcgccattttaattggctcgacaaatgcatacattgagagcttgtactgagctggaaaaggcaaccatagattagaaacacgttaagtctttatatataaatcaatctaattcttgtactagactggttgaccaattcagttccattttggatgctagagctagctcaaacttggtttgaatgagatttacagctgtatgaattacagaatatttagccatatggctcatgtcttgcttggcacctgaagatcccctagaaatcagaatgtagatgcaccatgttgagcacaaagacacaaacttagccctgtttcaatttctgtaagagctgagcccaactccgtgcagcaaccaggctgcatgcaaggcacaagcatttatctttttgctcattcttggcatgcactcagggatctcacaacgtgcatactgtaatcctaggtagatccttggacagttgtatctacctattcctggctagtgtctgacaagttctctgccggttcaggaccagttttgtctttcaaaccaaaactcttgttcaactttccattcatatttcccctacaagacagtaggcttacctatttaaacttgccaacaaaaagaccagctttcagtgggaacaaaaaaaaaaggcattttgaattttgctcgcccttaattaagaacttcttaataagtttctgtcagtttcttatcaaattcgctctgaaacatatcacctttttatttctttggttgtgcagttgtctgacttcttattcgggaaactagggcttgaatttggcagcaatgctgtgattacgaatggacgggtaagcttttgtgtcccccttcatttatttgttgatacacgcatacaccaatacatattggccaccatatctgcctccgagcagtaaaacagtggtactacttcactattttgggaatctgtgctcatgataacagttacttcaatctgatctgtcggcagcttctgttgttcatgacttcatgctattccttacctttcaggtatttgttgtaaatgaaggagattcatttctaactgatgatttaggcctgcttgagtctatggagtacgaattgagaacaaaacacatttatgaaataattgaagagatcgaatggacaggtgtcgaccctgatgacctgacaaggtaagttaggcatgtgctagttcctgtagctctttccattggggtttattaatggtctaacctgattggtgtcttcaaatgattaaattctctctacgtgaggtgcatatttgtacttacactttatctgttgaactgttcgttctttatattagaatattagctccagaggcaagttctgtgttccttttcttttctgttttcctctcttttccccaatttttcagatgacagtaaaacatgaaatattatattgaaaaattaactgatctaataagcacttttatttggcgtggttctaataataaaaatgtgaagttatttcatttattgagaaatcgtactatatgtactttgttggcagcaaattctacagcgatgtcgccatgttgatttcatcatcaatgtctattcgtgaaaggccatccgaaagagcccattttgaaattttgcatgcagagcacaggtaaatctcctttatgtttgcatgcatcaactttcagctggaatatgtgttattgcttgttctgttctattttacttgccttttctggacattgacatggtatccaatgcacactttgcccactaatttcttttattatgcttatatttaaacctcaagtaccaaccaccgaatttttcacttgaaccaacataaagcttccacttgaaccaacataaagcttccagtattgttggatgttattttttttttaactttaagcagtttgcactcatctccttctgtttcaatctgccatgcagtgctattaaactgaacggtatgagttcaggtgttcatatcgatgctgtcattgacccactaagtcctgctgggcaaaaacttgctccactcttacgcattctctggagacagattcagccgagcatgagaattgttctgaatcctattgtacgtatatgtttattcaccacaacatataattctgcatctgcattgaaagaattttcccatcgtgatttgagtagtttttgtttccaagttttaatttcaagactgcggtgagctaataagttattgtacaagtgcttgtaaataatattctttttagtagaaaataaagtaggatcctctcctgctgtttttgggtaaaaaaaggttatcatacaattgcatgttgatcttgtagaggctactgagtgctttaagtctttacctatatcgtcaattaacagacttatttgttgctttggttggatgatgcactgtaataatccatagtgcttcttttccgttacttttattttgatatggttggtttgatctttgttgttacacttactatcaattcaataacttcaacattttaaccaacttcagtagctagaggttcgccggcataattaattaaattcatgctattctgtgccagccttatttcttagtgaatctgctctaatgaataagaacgtgattttacttttgaaagttcaattacataatggcaccgacactccttaaatttacaaaaaatatcgtaataaccactgcacttatctcatagttctcctcaactctatgatatttgtttacatatcagttcattctgcatcttgagttaatcatgttcaattgaattgttcatctatgtgcacaattcgtgcaaatttttgtataatctttaattgttcatctctgtacacaatttgtatgccttatactccctccattccaaattgatctacatataatttttttgagattattcctaaatgatctacatatttgtgttcattcattaagtctattcgttatttgtgcattggagtaaatggacattgatgcatgcatccatgcacacaagtatttataacccacatgcaatatcttgatttgctgttggctaggaaataatgggatggtgcatgcattgagtttgttgctagagtaaatatagtatgagagagttattagcttttcttggtcttagtgtacctatgaaatatgtagatcaatttggaatagagggagtagataataacatgacttaacactataacatgagttagcactatcttttgctgaagctaatgattgagagaaactattatttgtattgtattgtttaaagtcatattgctatgtcttggtggatgaatttgtttctatgcttgagcttggactagctacaattctaactgcttttaaagctaacattaatggaccattttcagagttctcttgcggatctacctttaaagaactattatagatttgttcttccatcaatggtaagtctcatatatttaccgagcaatagtgaccgactgatttcctacaataatacttggccatttgatttgcaggacgattttagcagtaccgattattctgtgcatggacctaaagctttcttcgcaaatatgccactatcgaaaacacttacgatgaacattgatgtccctgaaccatggcttgttgaacctgtcattgccatgtatgctacccattaaatatgaagtaaatatctgaaatgctatttttagtgtagcatcatcaccttctttgcttgtttttttgtgtcagccatgatctggacaacattttattggagaatctcggtgatgttagaacattgcaggcagtgtttgaacttgaagcactcctcttgacaggtatagtctttgacaataatctcttttggttctggtggattattttgttaacagaagaaattctcttcaggccattgcaaggaaaaggatagagaccctcccaggggtcttcagtttatccttggtaccaaacgaagaccacacttggtagatacgcttgtcatggccaacttgggttactggcagatgaaagtttcccctggtgtatggtacctacaattagcgcctggtcgtagtgcagatttgtatgagctaccttcaaaactcattgccattgatagcttgaggggcaaacttatgcacattgaagttcaaaagagaggaggaaaagagcacgaggacttgctaaatgctgatgatgacaaccacttccaggaaaagatggtctgtttcttatttagttgcaaacatatccttgaaactctaaacaacatttcctttaaaatcatttttaatgcaggataacaaaggctggaataacaaccttttgaagtgggcttctagtttcattagtggcgactcatcatcaaaaaagaaggatgagaaaatctctgtaaggctttcttatgtcagctctttaagtttactagcctgcatgctactgcaaacagtgtatgaaaaggcaataccaagctttacttggtgcaagatttcatgtttttccttttgaattgcttctaaactgtcaataattctatataaagaatcactccattgtaatttttttcctaaggatacaagggagaaaacgatccctccccaagagtcgaacaatacaacgtatgcttaaattccagtgacccccccctccccacccacccacccacaaataaataaataaaacccgacggattaagcttctagggcaagcgatcgacaaggagttcatgaagagcgtaggcgcgggcgtaacaccaaaggctgctctccgctgcaatagactgcagaacggcttgtacattggggcgcaccctcaaaagcacaagcatgtcagtgcttccatttctcccagcttactagaatgaacagagagttgatccccccttccttaggtctttaggagtaccttttgtaactttgcaccatcagttgaaaagacgcgcggtagattgagactccattataattttacaaaagcattttgcaaaaaacatgtctagttcagcctctcacaagttcttgggaactactccctccatcccaaaataaactaacttctagagtttgaaatttgtcccaaaaaaaccaacttctaccttcttacctaccatcggtccgcaaattgacaagttttatctcttcaatactcctcacctacccacccatcaatataactttgctattaattaggggcattttggtcttttgtctctccccttatattcaccttgggaagctaggtttggacattttgtgggacacagtgagtacacaagaactgatacataatgacacactaaaaaaatatacattatatttagctgctaatttggtttcactgaaaggaagttgccgtttttttgagaaaaatacattgcaatataaaaatctagaacagttgggattctaaactctgtaagaagtttgtctgtttgacggaaagtatataaaaggatgttctgtgttgcaactctgtcgatgttatgtgaaaacacagtatatatgtgtcaattccttctttgccactctaaatttggtatcatcccttatttgttactcgtgtctcactgacatgtgggacctggacccaccttccaatgagataatgagtaagaaaatagagattgggaaaaaatataagagatttatccaataaacttacatgtattatcttatgcactcaaagtgaatcatttgagatatgtatctgggtatcacagttaatagagatagaagatgagatggtcagtttgaattttgagtattgcataaatctaaacgcttgcttgatgatggtgagcgtacatctaactacatgtacatcaatgcatttgagaaacattcatctttttattgctactggattgcatatatttctttacttgatatatttatatagtaccatgaatatgttttttacagattctaggagaatgttgattccctttaaaaagtaacagattagttccactcaagcttgtaccttacattaagtggttatgttcttcattgtgtgttagaaatatcctttattgtgcatttttattcaggaccttaaagctacaagacaaggggagacaatcaacattttctctgttgcttctgggcatctgtaagtgcccattgtccatgtctattactctacttcttagctacttctattgcccattgtcattctctttggatctttatgtcgtttctggtgtttcttatattttattttgtatgacaccttataaatttgtaaacccagtttcctgttgcttgctggcattgttactttttttacactaattactggcactttttgattaacttgtaatttagtttctctgttggaccgtacaatccggtgttcttccctagtctactttttccagagcaaagcgctggttattaccctacaaagaacatgttattttgagaagtaatgagaacaggtgatttagctgcaaagtgttctgttgcaggtatgaacgtttcctcaagataatgattttgagtgtattaaagcaaacacaaagacctgtgaaattctggttcataaagaattatctatctccacagttcaaggtacgtgagctgcctttgcttgagttgagtatttaatgagaagatattagatgtctgcctttagttgagtatttcatgagaagatattagatgtcttcctttgagttgagtaatgagaagatattagatgcctgttgtctaaccaataatccaatggccaggatgtcataccccatatggcccaggaatatggatttgagtacgagcttgtcacatataaatggccaacatggttgcacaaacagaaagagaagcagcgaattatatgggcatacaagatcttgtttctagatgtcatatttccactttcactgaggaaggtattttcttatgttatattcatccttgtagattcatgaccatccttatttatacgttaactaagccacagttcatcgtgatggataatattactctgacactttccatgtaggttatttttgttgacgcagatcaaattgtgagagcagacatgggagaactgtatgacatgaatctgaagggtcgtccccttgcgtatactccattctgcgataacaacaaggagatggatggctatcgattttggaagcaagtaagttaccaaattgttgttggttacataataaatgttttttggtcaagttgtttgctaactcccttttgctttccctctgtgaaagggtttctggaaagatcatctgcgaggaagaccataccacatcaggtgggtgtgatctttgcatatggtatgccaattcattctttctggttttgtgttgtaattgttatgatttggtgttattccagtgctctttatgttgttgatttggccaaatttcggcaaactgcttctggagatactctacgggtcttctatgaaacactcagcaaagaccccaatagtctctcaaatcttgatcaggtaattgaccaccgctaatacatttattgatctacttaacacattacagggatcataaggctgtacaattccaagtcaacctggttggcaaacctgcatgcacaactgccttatcaggactacctggattgtacagtctcatttgatgaaatggattttggtcggtactgctcatttagtggctgcagacctggattcacataagaattggatttcttctagtgaaacaagatatggaaaaaaactgaatattaaaactcaaataatttttattttatattaggctatggtaaaaaaatgttcttcaaaaagaaaactgttagactttgctacctgacagaaaataattgacagcatggcagaaccttcttgtacagttgcaagaggcatgtttcatggccatctgaattctgaactctattctgagacctgtgattgcaagaggcatgtttcatagccatctcacttatctctgttatcgaaacctaatatcaaaagttcataaaacatcatatggcgcaatcgtttgagtgggaaccaccaactagttaacccataggtttcccattttaaatacaaagtgcagctcattgtcaattcgcactaggacagctggtttaagtctagcagaaaattaaaaaaactagtttgcagaaacatgctgtggtgtgcagagattaatggaagaaactacacaaatgcagtttacagatgtgaacatgtgtgaatgcttacttgcaacacctttatattcaggatctcccaaattatgctcagcatactgtgcccatattctctctccctcaagaatggctatggtgtgaatcttggtgtggaaatgccacaaaggcaagagcaaaaaccattgatctttgcaacaacccaatgacaaaggagccaaagcttcaggtaaaattattttgcagtaatagtccatattttgtttcctgtttcttgtctagaactaattttaaggttataaatcgactttctagggtgccaaaagaattgttccagagtgggttgatcttgacagtgaagcaaggcagttcacagcacgaatcttgggagataatccggagtcaccaggaactacttccccgccatctgatacaccaaagtcagatgataaaggcgcaaaacatgatgagctatgatacaccagccgctttggaggcaaggattcttcacactgactgtagttctctggtgtcccagcagttaaaatcatattgctggttcagggggcaatgaagtgcagataccataatgtgcgaatcaatcgatgatcaataatcaatggtggtgccattttgcattttgtagggctaactgccgaaaataggttcacgaaggggtctagttggtagtttttcaagaacttgtatacatagaacactgtaatcccaattcgtgtattaagatgttcttcctgggacgctgtaaagtttattggcaactgccagttgaaagctagtattagcaatctggcagcccgagaattttgtaaaagttggcacccaacaaagctcgagaatgtaagatactttggtgttggtattccaaaacatttgtagtttgtgtatttgatacgtggaaatttgatgctcatttttctaagataggaatttcgaaagacgcaccaaaaaaagggcgttgcagagtttgataaatctacgataattgataatttctcaggtaaaagctactccaaattaagcaggcgaggcatggaagcgcctctcgaggggagagggattacagttatctattgtgggtagagggattacagttatctattgtgttggggaaaaatatagctctattgtgggttactattaagatattatatgaaagtcgaatttcttccactctcatttgagagtgcgaatacaaggaggtattttgtgtttgggaaagtcagaagaaaaaaggattttgaatcctccttttcctttttcccttagaaaaataactcaatcaaaatccaattatctactctacaagaacgaaacgctatcggctaagaaaaccgatactgggattttcatttcgaacagtgagcaccactagatattaaacctgcaaataaatctcagttaaattaaaactataaactatacattcagattagctgtaagcaaatttgttaattatttgctttgttacaatattacaccactcttttcctatgttgcagtgtagtgcttggattaagtttcatttatgtgcattgggcctgttcgatgtgactactagatagtagccagtagctacaatagcaacacataatttctaccatagccactgcagttgggcagccgaacacacccattgaactcagaagtacttcctccacctaaaatatactaatgcttaacttatatatatatatatatttcataatataagacacaaatgtatgcatgtaatatattaccatattcctctcccatgaatttattttttaaatctttcaccctcgatacatatattatatttattagagtgatacaaataaaaatgtgatatttttttttctgtttttttgcgttagtagtagttgtttcttatatttgggatgaaaaaaaccaagatgagtaaaactaattactttctattaaggaaggaagagttttcctataaagttacggttccatcaaggtcatatatgcttgacttctttttttagaaaaaaacattagcaaagcttccatacgttgcaacgaaaacactaaatctatcactatctgcctattggcttatcaaacgtagccagaatttagaagttaattttggagtatattttagccttttttttcattgttttctaatattcggccatggcttttgacattttagaatagaagtataagtctgatcttaaaattttcgggttgtctcatttatttttcgacggcttattagccgtggctcaacctacccatcaccaaaattaccataaacacaacatacttaggatttaatatttgttctgaactctttaagaaaccatattctttattttatagagaatccagcaccagccacgcgggaaatatctgcccagcatcagccacgctgctgtacccccaaggcccaagccaaccaccaggcaccggcagcagctagcgtccaaggcctcagcctccgccctccgccgccggcgagcagagccccaattcgccattgctgcggcagtgagtgtagcagtctccaactttatccgtcacagctaaaagttagtccactcaatacactcattgcctcatcatcgtgtcaaattaaagccgtgctttccacgcagattccccggctaaaccggactaaattaagacaaactgagactgaaaagaactcaaatcgataaacgtgagtgaatcggcccgggccacctcatgtggcacttgcgggggaggagctccgtgaccgcagcagcagccgcagcgctacataaaccggtcgcccacctgcgcctcctcctcgcagtctccgcctggtccgtccccgccgcagcctccaacgtcgcggcggcttcgactacgactcgaggcggcccgagccctagcgcgggcgtcgcgcctagagcgatgccttcctcgtcctcctcgccgccttccgccgccgaggggacgaccgctgcagcgggtgggttccgcctcaccgagccctcgttcctcgagtcgctgatgccgaagaaggagatcggcgtcgaccgcttcctcgccgcgcatcccgagtacgacggccgcggcgcgctcatcgccatcttcggtgagcaacctctcccctgctcttcgccgaccacgttaaggttttgtttatgcatctccgaggctggagattggaattcgttgagtggttcggtactctaagtctagtttagcttgttgctgtgggttttactggctcagttcgatggcccctgcgacttgtgtagatactgcattactattgataatggcaatttatgcccatcgatgcaatgttcatcgtgtgagaccgatcgctcatcaaagagctaactgaattttgtgggaatgatgtggcattaatagaatctgttttgatgtgaatgtagaagcattcacttgtagaaccaaatttcccttacttgtccaattgatgttggagtatagggcatcgccacatcacacatgtctctatttcaaataagaaagacaactgggtttgttttcacagaattgacactataccgctagtagacagtcaattatacatgtggagaaagctttactattcagatgccattacaaccactgaactacatgcatgcttcttaggaaggttgatatataatttacttgtcagaggtttgagtccttggatgatctgcaatatatctgacttggtcatgcaaatatgtatatattattataatttcattgttgtaggtctattggtttcgaaaaaaaaaagatatggttgccaattgacttgtatgtgtgacagattctggagttgatccggctgcagctggtttgcagactacttcagatggaaagcccaagatccttgatgttattgactggtgctgtaacccctctgaaatagtgaagcttgttggttttcttttgacatgcttcttcaacagcctattcacatacatgtgtttaagtgcagcacgggtagtggtgatgttgacacgtccaaagtggtgaaagctgatgatgatggttctattgttggtgcttcaggttggtcttataattttttggtttgtttacattattcatgcataggagaatttcaagctattgaagcatgtttattttgcttgtattgaccgtttaggtctgcattatttatattattcatatagcgtggagaatttcaagctattggcgcatgattttttccctttaatgatagtttctgtggaaattttctttgttatcaaactttagcatgctaattctgatatcaattctatttgttttaaagatatcatctatatcaactgtgttttacaggggcccatgtctacagaaataccatattctgaacgttgagttcctgccttaactgatacgctaactctgctttcacccaggcacccatctgactataaatccctcatggaagaacccttctcaagagtggcatgttggctgtaaattagtctatgaactcttcacggacacacttacctctcgtttgaaggtaaactttgtacttggtgcctgcattctgaaggtttgtaacaagatatctttgtaagaacttacgcattatgacttcagaaagaaagaaagaagaaatgggacgagcacaaccaagaagcaatatctgaggccttgaaacagctgaatgaattcgaaaaggttggagatgactttctttgagtgcatttaggaattttaggttcactcctgttacagttttcattcaccctgtgtctttcgtctgtttctttatggatagtttgcacggttgctgttgtcaattattgtgaacttttgtgatatagcatatgattgaagtgtaggatgtaaataaaagtaaatgtgaaatggcctatgtgttgctaatgtttgaattaatgtattaattaaggggaagtgtttgctgctttgcactaccttctatgaaaattgtgagcactttctgcaagaattgtctcaaccccattaaaaaattattgcagaaacacagtaaatctgatgacgccaaacaaaaaatggctcgtgaagacctgcaaagcaggcttgagtacctgaggaaacaagcagaagtaaggaaaacgagcatatagcatgaggtgaagttttagccaacgtctgctactttatatgtcttacttttgtttctgtagggttacgatgacagggggccggtaattgatattgttgcatggcacgatggtgatgtgtggagggttgctgttgatacccagggccttgagggcaacaaaaattgtggaaaacttgcagattttgttccattgacaaactacaggtatggtcaatcttgttttcttattgatgttgtaaattagaaccttccttgcagacacatggttcattgctcatttcttatcccagatgtattatttgttggttttctatttgtgtgtgttgtaggcacatgaatacttctctgaaatgcaagctctaattcttttaagcccttaatcaaaagtgtgctctctcgcttagttttatacgattataattctgttcctgctgcatcccttcttctgactggacctgctgcccaatttgaacttatgaaactgcatgcatctcatgtagagtcagagacctagaagacggtgatcaaatatgaaatagtactttattatgaagtgcataaacattgtattacccatgtttcacttattgtttagagtacaagatgctgatcttgtatcttatcttattccatccatccatgttagatgtacaaactgaaaggttatcttcaatgtgttgtgttcctgatttatttaaaattatctgcagacttgagcggaagtttgggatttttagcaaattagatgcttgctcttttgtagcaaacatttacgatgatggaaaccttgttagtatagtaactgattgctctcctcatgctacccatgttgcgggcattgcagctgcttttcatcctgatgtatgtccttgactctttgattttcattttatgaaaattataatggcactgatctgttgacaatgtctttaaacaggaacctttgctcaatggagttgcaccgggtgcacaactgatttcctgcaagattggcgatacccgtttaggatcaatggagacagggacaggcctggttagggccttgatagctgcagtagaggtgattacgcttccttagttttttttgtatcaattcatcagaataaataacaaaatgtacttgaatctgttctgttcaatgcaattattttgtaaatacatcccaactaagtgctcagtgcttgaggatcaatgattcgatcaaaacatgtattacctcttgttctacttgatatttaagtttttctttattcactaccattcacgtcttgaacttcagttactttattttttctttaatgcctcctttatttgttgtttatccagcacaaatgtgatctgattaacatgagctatggagagcctacccttcttcctgactatggcagatttattgatcttgctagtgaggtgggtcctttaatgtggtgttatttcttatccatgcctagaatgctctgtaaaatcttaactggagctttatactgtttcacaggttgtagacaagcatcgtattatatttattagtagtgctggaaacaatggtcctgctttaaacactgtcggtgctcctggtggtactagttcaagcattattggcgttggcgcttatgtctcaccagctatggctgctggagctcactgtgtcgtacaagcaccagctgaggggatggagtacacatggtatgcgaccagtccctaatactatcatgttactccccaacctcaagtcctgaacctttccagaaactaaaactgaccgctgttctttttacgaggcaactttgtctagataaaccatgatatgagtgtatattttgagcactgaacatttggattgatgggtgctctttcatggctcactcgaggagttgcgctcatgttttactataatctctctgcataggaaatttgccttatgttccaaaattagcaaaactgaacagaatatggaaaaggataagttctaagtcactgtaatagggatccacacagttttttgctttaataaaaaagttagaaacttaaaaacttcaaatagagataaaggaatggctgaccatattgtcctgtgtctttctgaaggaactcaaggctttatgtgttggcacaacatgcttttctgatttttctcgttaggtttaaggaaaagcatttgcactaattgtcaagcagtaatgtgcctcaccacgaggatgatggttacttatgtttggaacccttgctacatcgttgctcatacctgtaattttgttgcggtctcatagaatctacatggtgcaaaccttgtcttgtcatcatgagattcccaattaccacatttgtttattcattagtctttccacatagttcacactacacttcgtattgcctctagtgcaatacaccctccgtcccccaaaaaagaccaatcctagctatgaatctggacacgcacgtgtctagattcatagctagaattgtgttttttatcggacagagggagtacattgttagaaagatgaataagagaggaaatgttttactttcttgcctccgataaggtaggtagtgaattttcctactgcctagatttttacatctcttttattgacttaaaatatagtttatttgaactgtgcctgcctttacgtagtaacattaaatttgttgtttgaaattgacatgtgtggtgtggttggatttgttaggtctagccgaggtcctactgctgacggggatcttggtgtctccattagtgcaccgggtggagcagtggctcctgtaccaacatggacacttcagtctcgcatgctcatgaatggaacttccatgtcatcaccttctgcctgcggtggggttgctcttcttgttagtgccatgaaggtttgtatgccatcaattttccattaagtaatgtgatcaacgttttggatgttcagtaaagcaatgcgaacaaaaacatagttatgttaatgaaggatacattgtaggctgaaggcattccattaagcccttatactgtgaggaaggcaattgagaatacagctgcatcaataagtgatgtgcctgaggagaagctaaccacagggcatgggcttttgcaagttgataggtaagaataaaacttgtttatattatgctctacgaggatgatgcctttaatttagggatgttgaatttttagttgatgccatatttcttttgctttgtcagggcttttgaatatgctcaacaggctaaggaattgccacttgtttcttatagaatatcaatcaatcaagtgggcaagccaagtaagtatatttctatttatactattcatctgatctcctcacaaactgtacaaaaagagtctttattttgaagtaaacattttatgaatatacaagctttgtcctgtaacaagtagagtaaattttgggcctgttacaggacaaagcttgtaaacatcagtaatattaatattgagttggtatcttttctatatatatgataattaataccatgtttacagcttctaaacttagaggaatatatctacgtgggagtaacacatgccggcaaacaagtgaggttagttcctgatttcctgccgacttgcttggatttcatgtcctccctcccaagtggcccttgatgatccctgtacttgacctactccctagattcgcagaaaccctttatgatcaataaggttagagaaaagtttttccatcatccccatacttgatcaataatagcctagatttatagaactcctttatgatcaataagggtaacacttttaagttttacttttaacactttgtgtatgcactctgtagagaagcacatacatttgaactgtaccgactttgccaattttatagatcaccgaaattaattgtatgttttgctttacagtggactgttcaactagacccaaaatttcatgaggatgcaagtaacatggagcaattggttccatttgaggagtgcctgcagctgcattccactgatagctctgtcatcaaaattcctgagtacataatggtgacaaacaatgggcgcactttcaagttagtaccttgtctgtttaagctatatgattttttgccactcttcatttcagtaaaataatactagtaaaatgaacttattggtgttgaccatatttgctgagatctcaagttcataagaacacacacatgtcatatacacttcgttatataactcatctacttcatagtccatgattgtgtatattcaattcacgtcctttgaagttgatcaatgatgcttaacttccatgcaagtagcaacctgactttgctgaaaatatattttgttgaaagagaacttcactgaaaaaatacatcaccactagagcatactccctccttcccaaaataaatcaacatttgtacatgaatctggacataggctatctccagattcatgtacaaatggttttattttggtacggagggagtatataacttacgatgtctcttcagttataaacaggatgtatgtcatgtcaaacgacacaactaacaggtgatacaaggactaatccaattggactagcaatattattagtaaattgtctgatcaataatgtatgctgcttattctgtcaagcgccataattttcatgtgtttttcctttgccttttgcagcattgttgtaaatcctgttaatatcagcagcggccttcactattatgaagtttatggtatagattgcaaagcaccatggcgtggacctattttccgcgtaccaatcactgtaataaagcctattgctctatcaggagagccacctgcattgacactttcaaatctttcctttaagtcaggtactcagtgtttttctcagttgtttactgtaattgtgtgattctgtttttttttctaaaattacatagctttatgttcagcttttttttgtatgcacacttgttacagttctctacaaccttgaatatttagagtttttttaactgcacaggctcacatttggacttccacctgtgtgcagatttgactttccatagaccttctatatttatttctagcctcacagatctacccaaaaggactatccaatggaatttcagttgattcatagccaaatgggtgcacttttgagaaaaagataaaacagtgttcttttctgcatcagttctattaagaattttttttagaacacgcaggagatctgcgtacatttcattacgatagaggaaaaaaggtggacggtgttagagataaactccgacacccacccacccggaagtacaacaccaacaccacacgtccacaagaagcaaaacaaacctagtgacctagcactgcagccctagacaaaagatcacggagcttagaagctcctgctaggcaccaaagggcgccctcactagcaatggcttgaaggacatcatccatgcttggggtagtgccattaaaaacacaattgtttctatgcttgcaaatctcccaagcaaccaagataataaaggagttgagccccttcttctcactagcaggcaatccccttactgtcctcgaccaccaacaggcgaacctagtagtgtcctggcgtgcaaagttatagtagccaagctgttggagaacaaaacaccacacttgccgactacatacacaagtgactagaatgtgattaatagtttcctcagcttgatcacaaaggggacatgcaggtggatgccctcgtttgtcaagccggtccgctgtccaacaacgattgtaaattgccaaccatataaacaacttgttctttcccttgttaagaatcacttgtagctatggcttatagctcccttgtttctgatctttgcctccctttttccttggaggtgaatcatccagttttgtgctgtcaccatttttttaacaattagttctatcatgctgaaccatggtcagaataaacctgtaataattattccatcgaatttgatacatagatatttaattaatattgttctattctgatataaaagttattttgatcttttttctgacaggtcacattgaaagaaggttcataaatgtgcctattggagcttcatgggtggaagttacaatgcgcacatcagcctttgatactcctaggaggttctttttggacactgttcaggtattcactaagtagtgatcttaatgtcccaccttcattcctatgacttatttatgcaaattctaacattgttataacagatctgtccactgaagcgacctattaaatgggaggctgttgtcactttctcttcaccttctctcaagaatttcagttttcctgtagaaggtggcttaactttggagttgtccatagcccagttctggtctagcggaattgctagccatgaacctacctgtgttgattttgaggtacttttgtctcgacaaaattttctgatcagttatatcaaatttacttggttgttcaactaaatttgcaaatatacttctatagcatccaatttatatcaaatgatatttatgatgaatttcattacaacttcacagattgtgtttcatggaatatccgttgatcagaaaataattggccttgatggtagtgaggcacctgtgcgtgttgttgctagatctctattagcatcagagaggcttgttcctgttgccactctgaacaaggttagtatagagtctatagaagcctgttgtaagctactctcctttgcacatatatttgatttgtatggattacaggtcaagaccccttatcgaccagtggagtctaatctttgttcacttcctcccagccgtgatagattaccatctggcaagcaaatcatagcactaactctgacgtgagttaagtttaggttctgagatactgtacatacctgttagtacttgatttgttttcatatttctctctctgacaccctgcagttacaaattcaaactagaggatggtgctgaaataaagccccgtgtgcccctacttaacaacagaatatatgataacaagttcgagtctcagtattatagaatatcagattcaaacaaggtacatttttttttcatttttatacatttgttcctttaatttctgtaccacttctatgatagggagatttaaattatgatttccagttactgatgattctttgcctgtagcttctgttgaagcaaaggctggattttatccattatctaaaaaaagatttttacccttctttttccttctgcatctagattggtatatggcatatcttagtccagtactccagtatccgcattatacatagcgttcccaattattacattcttttcccaagagtagatataatggatgtggtaccaaatgaagaaatacagcaccatcaccatgcacactttgttgcatacattttaaaaactttatgtactagaactatctactccctctgtctcaaaataaactaacttttgtacacgaatctggacataggctacgtccagattcgtgtataaaatttggtttactttgggatggagggagtatgatttttgggggaaattttgaaatagttaattatgttttttgtttttttgcttcaaaaaaggatgtcatccataggggggcagaaaaatcgaaccaatatgatctgctcaattcttgaagttactcttgctacccttttcagttcaactgtatagtagatgtcccatcacaagcataggactttttctttttgtgttaacagtgtgtctactcttctggtgacgtctatcctaattatgtcaaactctcaaaaggtgaatacacgctgcaattgtacataaggtactactttccttgtttcccacctacaaagttacatacattctaatgcatattaggccttctgaattatttctaatttgttcctgtggtgatgtacttgttttttaggatatgataaagttaatgtaaacttattgtttttgtctataaccattcatcatctgtacacacttttttctcgaaaatgcaagaggcttgcgcttcatttcattaagaagaagcagaaataccaaatatgtacaacagagccttctacaaagaaggaaccctctagaaagaaaaaaacatcacaaaaaacgacatgcaacacaaaaatctcctaggagcagctaaccatccaaaggaagtgacataaacaggaactcattgagagccttggcaccagccatacaccaaataacactctctcttgctactgcttgcaagacaaccgcaacattttgggtgtggcattgtggaatatgcaatttcccatgccactaggataattaaggagttcaatcctttctttgtcttcttagtaacatccttgactagcttggaccaccaactagaaaagcgggttgccgaaggttggggcgctgctgccaccaatcccatcttttccaggactaggaaccatacttgacgggcgaagacaccaagatgtgttgcattgactccatcttgattgcacaaagggaaagcatccggatgtggcattccaaatttggcaagatggtccaatgtccaacatcaattattcaccgccaaccacatgaagaatttgcagcaaagaggggcccaagtcttccaaattctcctccaaagggggcaaatttaatggacccaacggaataagtatggtaggcagacttactagtatagaatcctaactccaagaactaaatgtgctgatctagttatacacaagaatcgaaagttcagaactgtagctaaattttcaaactttgaactggaatggaatgagtgaaagaatgcaggaggtaaaaaatgaattagaatgggtggaagatggaatgaagttattttgggatgcaggtagtagtaaataatcagtctacaccaaaaagtaagcatatccctgaaaatggttccttttccttatccatcgcggtccagccttccttggcattctttagggcttttcttagtgattgtgccatggtgatgtggttcaatttgcaaataaatgatagatataaaatcattattatgataaaatacacataagaaaagagacatttctttgcacccaccatatggtatttttggtatcttttcaattgtagatttgcagagttatcttatgttggttgtttttgacaatttcatagatcgtactctatgttttgttgcttcagtaaaaaaatatggtttattgcgtgaatttgtctaatggatggtgtaggcatgacaatgtgcagttattggagaaactgaagcagttggttctatttatcgagaggaagctagagaaaaaggtattgtgtcctatattgttaatgagtacgagactcatttcatattttaattgcatgctttattgagggcatgtaaatgttgttgattataaataacatcatctctttcaccaaacaaaccccatgtcatttcagttttgggggtatgggtggtaactatggaaatttagccagtcaaaaatgctgtgaagtgtgaattatcatgtgtaagcactagagttgtgtacattaacatctaatattatcctgtgatttgtgcatattgcaccaccaccaaaacttctatcattattatgtaggttgcacatatgcaattgcagtcctatagaggagtattgtactaatcaggttattgtggaaacagggatagagcataagttcttctggaatgttttgaaacattttcttgttactgttaaattttgttgggggggggggatggggatcgctctctcgcttgtttagatattatgcaagctatttggtgcttatcacagattgtgcacatttatttttaaaagtcacctatccagtattgatgtatatgttaatcttattgcaggatttcattcaattgagtttctactctgaacctgatggccctacagttggaaatggcaccttcaaatcctctattttagttccagggtacttcctattcaaatgttcactactctattattagaataacactttgacaccaccaatgtttaattttttagagaaccagaagcattctatgtgggtccaccatctagagaaaaacttccaaaggtacagtgtcttgatggtgtataacttgattagattttttttttacgatgtatcagtctctgtatttagatgaccagttaaccaccatatctgtcttaaactttttggtttaatatgctgaattgtaccatatttgtatggcagaatgttctacctgggtctgttttggttgggtcaattacctatggtgcggtaagctctttcagcaagaaagatgaccaaaaccagcatgctccagcatcttatagtatctcgtatctcattccaccatcaaaggtcagtgtaccagatgctggttccctttttgtttcactatcagcattgctgtttttgtggtcttgtataatatgctatactgcaagttcaggtttaaatccatattcaagatcatcataggaccctaagtattttccctctgtatattttcactctcatcattctatttcatattcaacttatatgatgattgtctaagacttgcaggttgataatgataaagaaaagggagtttcatctggaagaaagagtatttcagagagattggatgacgaggtaggagcactttagtccttaaggtcctttgaactcattatcttatatgaagtgttcttttcggaagatgtttcttggtagaaagtaaataaattctatatgcatgcaactgatcattaatgacgaatttgtgttggatagattgttgtggacttaagctacttagaaagaatcataacttctacctgttttaagttaatttattttaggtaaaatggtatttctgattgcaatataaaatcgtagggaataatactgtcttgacattaaattgattgatcaggttcgagacaccaagataaagttcctttctggctttaatcaagaaactgaggatgacaagtcttcttggacggcacttgttgcttctcttaaggtagcaacagcttctcttccttagtcatatttatcctatgatttgttatcacactaagaaagaccagacatgattattttattgttatatacatggtgttaaacttaaatgcatcactttgttaacaatatgccaaaaaagtggtcctttagcatccaaaggtcacaattttaattttataatactgaaagcttgcagttcgccttattagcaccaaaggttaccttcgttcttctatttagcattccgtcaaaatcaaaacttctgttggttttctcttttttttttatctggaaagaaagatgtggaataccaacagtaccctttgctttcttcctcctacaacccattccctatctcaaatgagatcagccatggttgccatggagactctcgccaccccattgagctcaccaggcatgaccagtcaggtctcaggtcttgagcttgcccagccgctgcagttcgagcctcaatctcgtctgactgctggaaatatttgtagtttgcagattcataacaaaacttgatgtcgactctagtttgttttccttatttattagttttatttatgagcatctgtagtttgcagaattgtgattacagtggtacatgtaatcttagttatttttaattaatgctaagatgttacaataaagaaagacaatgatatcaatgtaatttgaatttttattgcctaacatgttaaattgtgccattttattataaaaattatgagctacatttgtttatattctccaatgtcaattaaatcaccttaaccattattgcatattgcagccagagtatcccaagtatacacctttgcttgccaaaattttggaatgcatagttcagaaagcaacttcagatgataagtttagccatcaaaaagaggtaattaatatttccttttcattttatgtttccctgcatcttactatgttgaataaaaaaaatgttcaaacaattttaccacatctatggctggacaacattgagcaggtttttggtttttttttttttttttttgtaaatcattactatgtccaatgctccaaattccaatgtcttttactaaatgagctgattagttagttgatacagtctttatgcaatagaatgttaccgtgtgtctaattctttccagtagaggatactcctgtggaaaaacaggcatcaggcatgctgccaagactcagcaatgtttgatctgaaaatcaggagcctttactgttttaagtctatcaaaccaacttgtgtgcactggtattagccaacactcagtcaatggtttgcgtctttcacatgaagcatagctatatatctgtttgataaaattgccaaggtcatttattaaccatattttgaaagacaaagggctattgagaactcgaaatctatgttcaaacttgtttcttttccacgtcagagcctggtagctaaagataattcaatctcttcactattccttcaggcagttttgacatttgggaggagattagtacattactctgtcagattaaattatatcatatcatttattgctagaaaaacccaaaactgtagataaatattaattacttctacatcgaagtgaattttcacttgactttcagtaatcgttgccacacaatacatctattgtattttgacttttttaaatgaacccttctgaaattttttttatgttcctggtcttaagattatagctgcagctgatgaggttgtggacagtattgataaagaggatctggcaaagtctttgtcccttaaaccagatcctgaagatgaagaggcacaggtaaatagattatttaattactagcatttgtaatcaaatgtgctcgcactgttctgcttagctgaaatctgctgctgactgatagaaaaataagaaaaagatggaagaaacacgagaccagttggctgatgcactataccaaaagggtcttgcattggcagagattgagtcgctaaaggtcagcatcttccatgtactttatacatatattcaccttattgtcatatctttatagtacaattatgtaatagtgtcaattgccataagtagaccaatctgccacctgggcctggcttcaccagagtactcttatataatacatttctaatgcttgaaaaccttgtgccagctttgtaagctaaattgtggcttaacatactacttgttctaagccagtatgtaaatttaataccaccgtgacaaatattccttcactttattctttccttgcccttcttaggatggtaagatttatgttaagtatggtttgcttgggcctattacgttctcagacccctcgagaaccttgcctagtctatatatgtatacaactgtttatgtattgacactattgaggtactttgtgttctccaagcatagaagttttgctttgtgtaaagtaagattcttaattctttatttgatgacagactgatgagtcaactgaggcatctgctaaagatgtttttgaagagaattacaaagaattaattaaatgggttgatgccaaaactacaaaatacggctctttaactgtcctgcgtgagaggcgctgtggaagacttggcactgcattgaaggtatattcttcctataccaattacccattaatattttcatagcattgcaattatgattaattttaaatgaagctagttctataactagcatttgtaccaagtaccaattaatctacatgtagattgggttgtttaaggggctaagttcccgatttgtggccttgtgaggtgtgttgcatgtttgtggaatatgttacttgagctgcaattataatccacggcatctattgttgctaacaaaaacaacagaaattgtaggttgtccttgacattcagtaaaatgctgttcccttaactcgttttggtcagtagaacttactgatcttgttgagtttctcaattttgtgaactataataaatctattacagtaagattattgcactttgcctaaatcgtgatatgagtagagtttgcatcaggctccgttttcacttgctatggttcaactgtgtttttgtagaagctgcaccgactatagttattgatgagaacaaattattgaatatcattcaatttgcactgcatgatatattgttttgtaacaaggcagaaatgtaaaatgctatagtcgagaaaccacatcaccagaattaaacgatcaattttcataaataaaaattagaagattgactttggcatgcctactttctccaaagaaaaacaacaaacaacttgacatcctagaaattctaaacttagttttgttaacttgccatcttaacccccaatttttttccgatgcacctactactttgctggtcttaactttattcgtggacaggttctgaatgacatgattcaagatgactctgagcaaccaaagaaaagactttatgatttgaagatccaattgattgaggagataggatgggtccatgtatcggcctacgagaagcagtggatgcatgtccgatttcccccatctttgcctccgttttaattgttaggactatttttcactcatttttcatcaccatggattcagtattttactatttttgtcattgttggtagcaaacttgctggtttggtagtttttcactaggtattttatttcttcaaatggtaataagaacttaagaaggctgcctgctactgctaagctcatcggtttgtgcagttttgtctgcttgtcatcttcccattctaatttcccggtttagttattgacgacatcgtttatccttcccgcataaacttacggtcgacgccagctgaagatcaggatgactgctctagtaaaacgatggttataaatggagcacttgtctcgtcttttcaacgacaagattttggctggtgctacggccaaatgtctaccatcgtaagtcatcatcagtccatcacgataggcaaacttagataagctctggagcccaaaaacgccgcctggtcaacaaacgggtgaggtaatccgttgcatttgcagtaattattatatactcactccgtgctcataaagtaaatcgccggtctccaaaacacaactttgacttcttgtttctataaaaatgtttattgaaaagtgatatatatatatatatatatatatatatatatatatatatatatatatatatatatatatatatatatacttttatgaaaatatttttcaagacaaatctatacacataatttttatatttttaaactcaacaacttgagagttattcatgatttatgttctcaaggtttgacttaaacattgtcctaaacgacttcctttacgagtacgaagggagtaatggatatctctactattttacaagtggaatcattctcctccctaaccattgcactccccaggtaagaacccaccgtgcctaaaaaaaaccaaccacctgaaaaattatcacgggaaaattgacccaccaaaaaaacccgattggaaaaaaactgaaccatgtaaaaaccatttgtcattctatcttcaaatcccgttgcaatgcatgggcatggtactagtaaaaaaaacagaaaaactagtcaacggtatcccgtacacatgggataactacgaccactagcatcttatcctcttcttccatcttatccccttcttcttcttcttcttcttcttcttcttcttcttcttcttctctctctctctctcccaccctcatgagcacagagacgacgatggcggctagctgtgcggggtggcgcgtcaggcgtggaaggcgctcggcccgctctccttcgccggcgccggggaaggcagcgccacgtggagctgctcccgctgcctcaggaacgcgtggcgcggcacggctctcgcgccgacgaggaccgcgatctcctctgtccctccacccccatgcgacagtgctgcaccgcggctgttcccctccgtctatcctcctctccacgccggcggtgctgcgccgctgctcgcatccattttttcgataccttgcaggtacccctcgcactccattccactctgactgattcctccaccccctccccccgcacaccggcaatgcttcatcgtcgcttgcatcccttcctcatgtgtgtttttctttttttttttgcttgatggtttccttgctgattttttctccggcttgtatgggtggtatcaattcccccgtcccatccttttgaatcctttcaattccataggtaccaggtaccacaggtaccagttaccaggtaccacaggtaccacacaccatgcaactggtaccatactggtaccaggtacctgcaggtaccgggtatcgggtaccaagtatcaggtaccagcctatgctgtgcgcgcatgataccaaggaggaatcggataggtatcatgcctctgaacatggtactaggtaccaggagggagcacacatggaatctcacctatacataaaaaaggaaaaggataagtcacttaaaatatcctgtagcaacgggatcccgttgtgtagctgccctcgtaaaaacaatgttgtacatattcaacctcatatgtcaagttgtcaactagtcttgttacaccagcgtccaggaaacaccggcacaatcgatgcagacacgcaataactaaaaggatatccaaactaagagaagatggttgttggaacttggagttcgacgagaggtttaaggttgtgatcacttaactgagaacacgaaaaaactcggattttttagtcaggtttgggtctctcagaatataataaccatactcttattgtattttgtgtggatgaagaaaagaggttataataagagttcttgtggaaacccaatcacttagccgttgccaaaatttgaatcttaaaacttaattttagcagtaaagtgcatcgctggtccctatacttgttcgtccgtgtcatctagatctgtgaactctcaaaatacattttcagatttccgaacttgtcaaattctgtcattctggtcccagattaccatgaccccttcgggatcctacgtgacggtcacatgacatgccacacgggcattgactcactttctttattttttttcctttcttctcttcttccttcctgttcatgtgggaaaaggataataaaatgagaagggaaacgtagaggtgaagaaaaaaagaaaaagacaatttaggaccgaatgttcatgtgccatgcgacgtaagcaacacgtaggatcctggaggggtcgtggtaatctaggaccagaatgacccatttaagaagattaggaagttaaaaatgtattttgagagttcagggacctagataacacgagcaaacaagtttagggaccgacaatttattttactctaattttggagttgattttgaggggtttttttttttctatagtggtttctttttcagcattggcttttaattcatgattcatgaagaacacatatataaaattgttaatcataaattattttttatcactaatatgctatttagtgtattatcagcaattggccaaccaacagtagtcataagcacgcgctctctctcagagggagcctgaatgagcgttacgcccttatatacagctagcttgtattgaaacatacagtaacactcactgttaatgctagtactattatatatactctatcatttctaatcctttcttcctgtatagttgatacattagatcaaccgtgaggccacatcatctagaccattagatcatctcgcgtctatgcaaatcaaccgttagatcaatgccttttgtcttcctattagttacctcatgcatcattagatctcactttatcactaaccactaactaatacatctctcacccaaagcctacaccactacattgtgtctgcctcttcctcgttccctttattttttttccaatggatctactagacatatctaggttgatccggtggattttcttggaatatttatgcttgaaggcacttcctcaatcatctaaggaggaaattccagtggtcaaatgaaatttggtttgccactgtcatagatgacatcgaaaatttgttggtatatattacaacactcgatgatctttaccaatcgcaaggatgtctatctcttgtggtgattggcttttggtactctatatgtctaacatgatctagcttcttttcatatctgatttttattcgtttatcaccaagcttcatatgccaatgtatcacatattacaaatagagataatccataaaatgccattgacaagcatctaagtctcagaaatgccatcgacaagtgtgagttccaagaaatgccatcatacaagcgattttgtcccaaaaatgccatcgccgttagggttccgtccattccgcgccgttaaatacattgttcatcctatagaacttaacggcgtggaatggaaggaaccctaacggcgatggcatttttgggacaaaatcgtttgtacgatggcatttcttggaacttacacttgtcgatggcatttctgggacttggacgcttgtcaatggcattttatggattatctcttacaaatatggtaacttcaatttgtggtaactttaagtattgagggattggtccactctcacatttgaccaataaaaagttgtgccaaatctttgtgtttttcagaccagcaatcactgaacttgtttctccatagttcctcccatttactcagaggtgaacatgtttcttgaaataccgttactagattcatacacctaacaattgttgtttcaagatcaataccagcatatgcatgcagcattatccgtattttctctttgttttctcgaaaaagaaatattttattatttgtttaaaatattaaaatgagatcttaagtcaatttagtacatgatgaaaaatagtgtccagtttgcttaccgttcatggttcttccaaatgggagtatcttaattggaatcatgtcatttctattcatatagcaatacattgtacaggtagaacgttcaagcatgtcgattttttaattaacttgcagcatgttgatcatgcaattataataaaattttacaactatatattcccttctttgtaacgatattgtaccaatagtcaaaagttttaaaattacatcttccaaatttacaatatagctatcccgcagtaacacgcggggtatcagctagttttcttgtattatagtgtcagattagatgggacacctgttttttcaactaattcaacaagaggagacttataaaagacatgcacatctaatagggaaaaacttatggtaggcgtatacatttaatgtggtatttaatatggaaagacttgtgatagacatacacattaattcaatgtgggatcgacatgatgtccgagtgcatccgtttgaacctatattggaggagcatattagcagcacgcaaaatgaagtcttgttagtgcataattgattgagtattaattattacaaacttaaaaaaatatttttttttattttttaagaaacttttatatagaatttttttgcacaaattcactgtttagcaattcgggaagcatgtgcaaatggaaaacgatgaagcttgtagtttggagttgtgaaaaagaacacagcttctattttcacgtgactttattgcatggcccttagaggttaagtctatggtaaaggagattgcccaaaacccctcctagtgagctagtgttaaagagcgctgccacggtcgaaaggtggctatcctacatggtggccccatggtccaaccaccctacccgatggtcattgtcaagatttaccacggatctacaaaggaaggccactctagaggctttagcgccaacatggtcaaggtggctaccctacctggtggtaacggtccagccaccttaccaaacggtcgtagttgaggtttccacagatctactacaaaagaccactctatgtgtctagggtagtagcagtgcaggatacacacttgctaggcccaagacatgatgaggctccaagctaaaacacaatggcgcctgcgctagtttcgtcgagaggaagtatttccagcagacatgacacactcaattctactgacacatagacgtattgtgaaagcccttagcaaaatcgcgaccccccccccccccacacacacacaaacacacgcgcacgcctcctaaacaataagagaagtatgtagtagtggcaatggtaccccgtacccataaaggtgacgctgataatttttcatcgtcccatgagatatgcaaataacgttgtgttatttgcaaattgacctacaaaagctattgttttgatctgttcaagtggccaccagcgagatggctaataaactaggagcatcaccacaactaatcagcactaacgagataaatctaatcttgtccataactgaattgctaacgaactactacactactggcttggcaaagagttcagtcctggctggcatctactactgccttttgcgctagctttttcctcttcctctcctgcttctcacgcctctcttcgtccatgatccggcggagctcctcgtcgtcctcttgtcttgcaagtcttgcactgcatatccaaagcaacggaaaaatgttagctagctaggtggtcgttttttgcaacaggattgcattgttgccgacaaaaaaaaaggggtgtagatcaatggaaaggtggaatttaagtaccttcttctctcttccatttgtatgctggcataattggcttccatgtctctgtcatcttcatctctaccaacgaattttgcaggattgtagctgcacaacagcacaagaagaccaaaagccgttgataaccagtgaaaaaactaacaaattatttaacagattggacaagaagcaaccgtacttgaacattcctctgatgattgatttatagtcaacttcctcttcatcacatccatcctccttagatttccttttgactaaacgccttgtctttccctttccgtgatcgttgtgaactgcacttgatggctgcaaacatagagaagattcaaacgcatattcctgaacagctgatattcttaattgcaaatctaaattctggataggattggcatcttggtagttctatcctaagttgaactaagagcaagaatagacgagagaaaaatcgttatatgctgctaccttaggtcttgaggaaggagccaaatgtttttgtgctaatggggctgacaccttttgcctgaaattctggccattgagagatggtttaggcttccgagattgcagagactgctgcccgtggctttgtgacaacattgcctgaggcctcttgctctgcagtgtttgctgcatcttctggccatttgaggatggctgtaccctctgaattttcttcatggcaggcaggctggatccatttttggcagaagaagcgatcgtcctcttcgtatttggatgaggctcctttccgactaatcctacacgactctgaatggaaggtcccttcaatccgctgtcttttgatactttgtcggtctgacttataagtttgctggttgatgcaatgtctccaacatctgtaataccaaacaagtgagaaatttgtccaggaatggaaggaagtaggaatcatatcatatgtattcataataaaagcttaaaaaggtaccatatttcataggcaaaacaggcatgttgtcaggttgttcctttgtagcctgtggagtatcagcatcatccgagaacagacatgaataatcccgattctgacggagtgcatcgacctttcttttctcctgcaaatgccaaacgaccaatgcagaatcacaggtcaaaactaatgcatcgtaatccttttttaagggctgcaagcaacataacctggtgatatttaatcctaaatgatccatacctctttaacaaacttcggtttctgctgctgcccgcttgggattggttgtttttttgaagcagaagaaacactgcttttctgcaaataattacgttggaattcaattatcaaagtttcacgtttgctggatctttaagaaaaataaaaatgaaccaatttcagcaagattaagttcaggagtacatacgttggatggtacgttctgtttttctttgattattgatgaacagccttcctcgatgactctgcgagcaagtgaaggtctggatggcccaaagaagctaccaaatctgcaagcgattatttctgttaacaactgggagagaaactataattttcatgttaaaaaaaaagataaggcagcagaaacatcatgcagtgcaatctgcaatgcaatgcaacgtacctatccttggccagaggctgcaccgacgacgagcagctagccctgccggcggtggcgccctgttgtgcctgattttttctcctgatgtccgccttcaattgctccctgagggtaaggatctccacttgcccgaccggaggctcttcttcctcttcctcttcctcttgttcttcttcctcctcctcaaattcatcttgctgctcctcacctaacaccacgtcgtcgtcgttatcgacgatgaaatcatccaggtcatcgtattcatcgtccacgagctggaaaaagccatttacgatcaatgttatatgttagcaattagcaatgctgcaatgcagtaaactgctaattcttcgtattgatgcgcaggagaaatcttacgacttacattggttccgtcgtcgtagctcgccatctcttcaacaacaactcacaatccctaataaagtttcaatctttcgtaagatcacggggccgtggggggcacaatctttccctagtaaagaataacaaaagatatatatatatacagttcaaacaaccgagaacgattccttctccgaaaacaagatcaatcttttcggcgagtttcgtcgagaagagaaacccagatcaatgtattcatcgaaaaaaagagatgtttcgattcgacgacgcacggcggagcaacgatatatcgatcgggcttacctggggcaatgcggggacggcgcgcggcgtcgactcgatcgcgccgaggggctccgcctccgcttcgtagggcttgagagaaaacaacagggggggttgcccgtgcgcgtgcgcgtgcgcgggggcaaggggcctgatgatacttatagcggtcgcctctccgcgacccgctcgcactcgcgccccgtccgtccctcccatctcaacccacccacccacccacgcgtgatgcgtatcctctcctccccttctgccgccgccgcccgctgcctcctatacagatcgatcgatcggctcctccatcacggccggcatccgcgcccaaccgcgcgagccaccgcgagaagaacccaaaccatcctctgccgcgcggtcacgtagcgcgcggcgtctttgtagcgtaggtgcgcccgccggtcgtgcatgccgcgcgcggccacgctgggggatggggggaatctcttcatgggaagtatctgtgtgtatcagagattgggagtataggactcggagtttgtcagatcatcagagttctgatcgatcgatcgatcgatctctctctatgaactcgtgatacggtggatccgttaatctaccacggattcaacgcggttgtggcggaaaactgggtctcgtctcgtggtggcgcaagaatcgggcgggccgaaaacggggggtggcctgactgggcttccgttggtagatcgaggggcgcgccttttccggttctgaaatcttcaaacgttctttttttagcaactgtttatgggaggggtgaaaaggaaactgacgtgcgttaatgccgtgcgtttatggaggtgtatcttgtgtccattacgtagtttccggggcacacgttagatcactgatcacctggccgggcctgttcacggtttgggctcaaaccgtgcaacccatggaacaaaaccaacccaaaccgtttctccgttggaaaataaaaaattatggtttatgataaaaatagctagataacatcatattaagtaaaataatgtggtttatgataatttaaatttaaatagtatgtaaaatgttgattcaaacgtaaaaagtaaggtggtatgactttatggaagaagaaaaatagggagatagtttggaccgtagattaatcatctaaaagctaaaaacaattgatgtgatatgacttaattagaggaaaaatgaagaaagataatttggatcatagattaatcatttaagcactaactgaggatgaactatataagtatataggatatcataaaacataataaagatatatattgaaacattatgtgaattatgttggatgataatttaacatgtttgtatttgaaaagctcttaaattataaaaactataaagatatagcatgtttgcatgatgtttaaatgtgatgattgttagtggatgatgatgtggcatcttgttaattagtggatgatgatgtagcaccttgttagtggatgatgatgtggcatccttgcatgttaagcttaaggagctagtggaggataactttatagtaagataggattcaatacgcacagtgaggagtgagcacgaagacgaggcccgccacggctcgagctggctttctggtgtcggcatcgtctgcacaacatcatctttcgtctccgcatttatagctccctgctggtccccttgtgttgagaaaatggccattataccatcttcaaaacagggcttcgcctgaataccatcctacaattgggatccgcccgaataccactttcaaccgggagaagttcactgaaatgccattttcttcctttctagtaaatcaaaatcattttgttacttttcttttttttcccattttgtcccttttctcccaactttgatgaccaaactgcccctcgactggcgcgaggtgagaggtggtgccgtcggagaagctggttagtgagctagagtataggggtggcaacggactggcgcgtggagaggggtggcagcacggctcctctcctcctcctcatctaccatgaggggaatgggcggcggccgggtcggcgcgagaggacggccgcaactcggtggtgcgagaggagggcgacggccgagtctgcacgaggggagggccgtggcgcggcacagtgtggcggcgcgaggggaagacagcgtggtggtctcctcctcctcgtctgccacaacggaaacaagcggcggcagggtcggtgcgagaggacggccatggctcggtggcgcgaggggagggagggcggcgcgagaggagggtggtgcccggatcggtgcgaggggaaccgggaaccctagcctcccagccagctgagactaatttagatgatgcaaaggattatgggggtaattttatcaactcaacagaaaaataggactaaattcttttaatttagataaaaacattgtgggagggtattagagagggttggttccgtttcaaagtggtattcgggcgaatcccaattgtaggatggtattatagcaaagccccgttttgacgagggtataatggccttctcccctgtggtcatgcacccgacccatggcggagagggcgttgtcgcacggggggcgagggtataatggccattttctcctcaatggtcatgcactcgacccatggcggagagggcgttgtcacacggggcaagaccctagttattaggaccggactgggccggcagtccgaccggaataaactggaaccaggggctcaaccggtccggtccagtttaaagattggacgtgcaatcaacccagggaaaaccgattggaccgccggtttttgggaagaaccggtgaaaaaacccagtttaaagatatggcgtgcaatcaatttgaaaaaccaattggactgccgatttttggaaagaaccggtgaaaaactagacgcacgtgggaacgtaggtgagaaaggacaaagcgcaggctgaaacgtgggggagagggaagaaaataggagaaaaatgtgggctgaggggttcgaaccctcaaccaccaccgagcaatgcatgcttgtgtggttagattatgtgtcccaatttatttaaaccgtgttgggccggcggttcaactggtcgaaccaatcaaaccgtgaaccgagactacgaccgattcgatgtccggtccgatcctaataactatgggtaagacttgcacccatgaatcgtcggaccgcatccgaggctctgtatgtcctgctcgtgtccttcttggccgttgccttggctgcttctgtgaccgccgagagaggaagggcacacagataagaggtgatagagaaagagaaggaaggagagagaaaatgaagagataaggactgtttagagcaagttaccaacactcccctctcattttccgcgtgcacgtttttcaaactgctaaacggtatgtttttttgcaaaaaagtttctatacaaaagttgtttaaaaaaatcaaattactctatttttttaaaaaaatagttaataattaattaatcatgtgctaatggaccgctccattttttttaaaaaaaaaatagctaatacttaattaatcaaattaatctcgtttggacgcagcctaacccgttgaacccagttcgtcctccttcctcaggatctgcggcagttttcatccctacatgcaagtttaagaaacatgatgatggtgcatcgtaagagcatctcatacaagaccagaatgtcatgcagaaatcagttagtacatagtactaacagatgtttagcaaaaatcaccctcccacaattgaatacagtagtacattacctcagtcaacagaatgctaagatctactacgattcatcctccattcctcgcacaattgaatagtacatacattggcacattgccggtcagaaagactgaatgcgaacaccacattctataaatcgtcctaccacaattgaatgatacattaccactttaccagtcagaagacagggtgaacaccacattttaattttcagcttgacccgcccgaaacacttcttttgtccgcccgtagtaaaccacctcacccccaggccacacaagaaaattccagccgataggagatccacctgtcacacaagacccttgcgcaatctcacttcttggtgtttcccccatcttctctgccgcaccatctgagttagggttggttggcacaatattgtttacaatatttgaacatactgtagtctcacctgtctgaggagcgtgattgttttctgcagatggaggtggttccactggcccatccttcacaactccagctaaaggcttctctggtggcttagcaggttcaaaagtggcaccgaggtcatgcctcattttcttggctagctccatgactaccttgatctctgaaaaatgtagaacagaacatgaggcgcatctcatgacttgttgaactaaacggattacagaggtatgataaacatcattcattaattgtaccaaagaaagatgcaatgcatagcttgtatgaaaaaaggtgtggtctagaatatatttcacaacattaacactggtgagatttaggacaatgtattgcataggtttttcatgtgagaagaatgaaaactttgtaaagttcatgtgttcaaaacttcaaatgtcaactaggatttacattccttactgataataggttatgaatgtcagataagcatatgtcataataggttatgaatgtcagataaacatatgcaaatggattatatgcttcatttcaatcgaaagtaacatatggatcgtgtagactatttccacatgtttaaagtctaaggcaaaaactaaaggcagatatgtgaagttgcatctctgggcatgtccactgtccatctaatttatacagctataagatttggcagatacatttatcacatcttttcactttgccgcgttgcttatactgacatagaagactagtgtacatgtagagaatgtaaaatgatgtttacacacgattttgtgtagatatacgattatatgtgttttacaccaacaacaaacaaattgtaaaatgataagaaagctatttatctttttgtatagtgcacaaaatgatacccttttatattaaaaagaagacaagtaacttgtgaaaatgatactatgtttttgtgtgtatgcatgatttaagaatcttttgtgtgtgaaagaggaagactggacatagcactgtatactactggagaagtagcatgagtacattgtatatcttgccatgccatgtacaaatagcattgaagtgtccgtaaccattctgtcagtttgaatatggttgactacaaacccccatgcctctacgtttggatacacttgaacagaatttctttttcttccaagcttatatataaattggagtactgatttacaaatgtgatcactttctttttaccaggtagataagaagtcatagacagctcaggtgctcactattgaatattgatacacatttatctaccatgttgatccaggcttatagctggtgcagctacacatttatctaccatgttgaccaaggcactctacagctggtgtagccaagttgccatttagttgaggatgcattagcacagacttctttagatgagatagctcttaaagttaggcaattaactgagttcttacgcataagatttggttatttaggagggtggtcttgtccatatatgggcctgaataaagtacccgtttgcttctctcctcttctgccatttgtgcacggttctcctgcacatggtttttctgctacctgattatcaccacagtcagctgcaatgcatcgccatcaagggtcagaaccaaagcatcctaacttctacgactataaaacctcctgctatacattcaagtgctgacatgcaagttggattattccaccctaatcccgcccatgttattaaacactttcctccattaacattcaatcctcacatagaagtctcactcattcactcaaaatcaccaacaagtgtacttctccaccacttcctatgtaaagcagcagcttcccattgaagatgtggcaccgccgtgtgggccctacctcagctctgatgagtccctctaggagctcccagtcaccaactcgccacacacacctaggccgagtttagttccaaactttttcttcaaacttccaacttttccatcacatcaaaactttcctacacacacaaacttttaacttttccgtcacatcgttccattttcaatcaaacttccaattttggcgtgaactaaacacaacactacaatgcctcaactgcctcctgcctacaccattcgagcattcacaatggaagcgataagccctgatgctccaccttcacccaagtaacctccccggctacagccacagtaacagacaggagagcagcaccgaaaatttcactgggtggaattatataaagcacaaaattatgatatttggaccaaccaatgttcaattttcatgtttttttcacgagccctaggttgattcctaccaactaaatggagcaattagtgactttctaacaagacataaattcgagacatttttttacctttcagaatctcgcgagcagcatcactgtttcggaaatcagtagcttcgtaaaccttcaaaagagagagtaggtaactcagaacagatcattatgcgaaatcccatgttacatatcaagtgcaattgtacaagtcttgcgagagttcagtttggcaggtctcctaagcagcgtcgttgcttaaattttttttccccaaaaccccaggtttacggagatcaacacgccatcccccacacacaagcactgcaagtaaccagtagcgaaagtaaccagtagcggaaaaaaaaaggagagggattttgcggggagagcgcagacctgcacgaaacgaacacggaggtcggcgacggtggcccggatcttgtagtaggcggagttatggaaccccgcctcctccaccttacgcttcttcggcggcggcggtgcgggtgccggcacatcgagcggaggagcagtaggagagaccttctgctcggcaacgaccgtggccgtgaccacgggctccggtggtggagttggcccaggtggaggcggcggggcggcggtgacatcagcggctgtggtcagctccgccatctgagtttgccaggtagagaaatggttttgactcggggttagatcaaccagagtgtgccttcccggctaatttactactacctccgtcccaaaataaactttataaaaatattgaattcacattgtctctaacattctattgttattagattgtacttggcatatattattttgttttttattctaaactatagtttatttgaatttattaattacctaatttaaatatctatactgttagtctaaattatttttgaaattaaaatattatagatatatcgcaatgttttagaaacgggaagacaaagtacgttcgatggtttcaatttataacctgataaagaatgttaaattagattaatgccaagtggcacaatatgttttttagaaaatttataacctaataaagaaaaaaatgttaaattaggctgcgtttagttccatccaaagtttggattttagttgaaattagagatgatgtgactgaaaagttgtgtgtgtatgacatgttgatgtgatggaattttgcaaactttggattcaaagtttggatctaaacacacccttagattaatgccaagtgtcacagtatgtcctttagaaaattttatggaatgaaaacttcttataagaatatataccttaataaaaagattttttgagtgactatgagtagtttgtggtatagattcttcttaagaaatttatgtgagttaggatgagtacaaattatgtgagcttacattttccgttctaatgcaactattctaagggtgtttggatgagattcagtaaccaaattacatctgctaaaaacaaaaatcaaaattaacaagttgaaagtaggtggaactgggcagaggcagatctaaccctgtttcggttgaggggtcggttttcggttgaacccccaaacttttttgagggataacgcagaatacctgatgaggtgtggatagggagggagggatggtcaccggcgatagacgatgcggtggaagcaggaggacgccgggcgccacctctgctcgcaggatggggatcggcgcaagcggcgggcgaggagacgaaattcgaggccgaggccggatgggatggattaggatgctcaccggtgagcgaatgcgaggagacgggagtcggggggcggcgggcaaggagacggggcggattggggaggcggaggtcgtgcagcgctctgccgccgcggtgtcgcctgcctatgggtcatatgcacaggcccctggggctggaattttttcatctcccaaaaaagttcatataaggtcccttatcttgtcgtcgagttttaaacggtcctaaaccctcctctaatcttgtaaaaccggatcacttttgatcccaaggtagtattgttttccggttttattgatgtggcggctaagtcccacgtggactccacaagtcaaccggcaatcttcttccacctcactcccctctactcccatctcaacccaaaccttcagggcatctgccaatgggttgggagaagggtgtcggtcggtggggaaaagctcgacggcggaggccgccgctgacgtggctcccaatggccgggagcgctcacatcatggatttgcgcgcgcgggtctcaactacaactgcaatgtcgtcttcacctgcacgcacaagggctgaggcttctgcctcatcacactggccaagctcctatccccctagctcatagtcgccccccgtcgagctgctcaaaagctgatgtgtttaggtgtccccgagctccgcctctcgtctgcagaggcacacacgcggttccgccacatcgtcttcgaggtcaacttcatctacaccacattgcggtcgcatcgtccccgacgcatgcgcccttctccccgccgctgccaagcttcttgttggctgccagccttctcccacccatcgtcaggcttctacctaccgccgccgcccaacgaccgccacccttctccctgctggtcatcggccaccacacacctctcccgcgattcagtgtccggcttcctcttcgtgtgcatgcacgaacactcatggagtcagtgatgctcgcgactatgctcaggcgtcgcaacgatactccatctcccaactcttggagatcctctcgccaatctcaacggtgtggctgacatatgaccacgatacggacgcggcgcagatgcgcagcgagctgccatgcaacgatgtgacagtgtaacccaaggggacgacgtgtcaggagcccttcctacttcgcttctttgcgctcttcaccatgtaggtccatgatgcagccgtcagtcgccactcttctccccacctcttgtcggctgccctggaagtttgggttgagacgggaagaaaggggagatacgtgggagaagattatcggttgatatgtgggacccatatggccccacgctgactcagccaccgcatcactaaaaccagggagcaatagtgccttgagacgtaatgtgacctggttttgcaagattagggatctgttatatctggtattttagttcatggacagttttgaaactcaacgacaagataagagacctcaagtgaacattttcctttcatctctctcttttctctttcttttaagaatagtaaagatgctcgtgcgttacgataggaaatccaaattacatatgttatttttttcatgtacggtggcagagagttagatgatggatatttaggggccttttttcactagtaatacgcccgtgctaaacgctatctttaataacttttaatatttaatgtttcatgttttttatatgatcttatttttctaaggaatcaatagtaatacatataatgaacttcctgtttcactacacttgtttggttattgattatatctccaaatccaattcttgatccatacatacctaatcgacaagatttaggattagtaatccaactcatgtttacaatacgtgctcatgaaccatgaaccatttagacgtgcctacaaatccaggtcgaattgaatgaaacatacagcacactggtaaccatgcaacagatgaataaaaaaaatattcatagataagcccactgcaaaatgttgtcggcaagtgtgctctataatgaacaccattgtaatatctgacacactacagcttatttacatattcgagtgcagaaaacaccgattgctattttagagatcaaacttcgccaccttgagtctgaaagatatgtaagttatacaaacaagatgtatgacaataacaacgacgatattgtttggatctacaaatggttgcttgtttcaatcaacttgaggcactttatgtaccaccaatccttcatttcttaccagtagtaagattgtagagatgtagctgttattgtcacggtggtatatagatatgggctatgcagtgagatggttatgcagtttagagaaatacaatatagctaagctcaataaaatataagcagtgagccccctcgaaacaaaaaagcagtcaatagtgttaggtatctggatgtttgcatacattgatttatgtgttacctaattttgtcaaaatcaaattgtttgtgatacatgactgaatgttatatgacatattctcaatgatttattatggcccgtgaccacctaaatctttgaacaaatcaatttgctggtaggaaactcagacaattaatttctttggttctgagatcatagtagcactgtgcagtttcagccattaaacaaaactttcatttttgcaaaattgaatttagataaatagccgttaaacttatgaatgtggtgtttcgctcaatggtgagacttatgcctgccagcaataccaaaatatacatgatcctcaaatttgccgcacatgactcacctttgtcgcactcagtgtatcagctgtgagtcctgtatcaattcagaagactgcaatgttaaactcagaaattttagtatacagtatacagtaagtatttttgtgggaaatcattatgaaggctggaaaatacataagtattttttggaaaatcttagtgtacagtaaacaatgtttgggatttttttttccagatggtaaatttgagaaacatatacagtaagtatttttgtgggaaataattatgaaggctagaaaatacacaagtatttttgtgggaagtcatagtgtacagtaagcaatgtcaaggacattttccagatggtaaatttcagaagcatggtcccccccccctaaaatataaatcagaatcatggctatccaagtatataaattatatcttgaacatagtgcagttcagcttttatttcatttataacggccatgatcaaaggataattcctcagctgaacgaaatacataaccgaatgaacctgccacaagagagaaggtttcaaatactcaccttggaaatatggctgtcattcaacggcaccggcctcatttaggcacccaaactggcaatggcagagactggtgtgagccacctaggggcatcgaaaacaatatcatttctattgtgagaataaaaataaaataaatagtattggctaggtgaaggcctttataagtttacattgcctaagtgaagcaggctctgaaatatggctgagttgctaaattttatttgatctcaggctacaaatcacaaaaatatcatttgtatcaatgcacgacttccagttcctctcctgtcactcagatggtttcagctaaagcagtgcacaacagtacggttgatcacaattccatactaacatctcccaattccaatgttaaatattttcttgctctacttttttctctcttccttctcgccctctgctacatgcacatacagtaggagcagcaaactcatacctggcagggccttatgttggcttgtttgcttcacttgaaaaccaaaatgaaatccagatcgaatgtgaatttgtaccccaaaccgaaaccttgtaaagatctcacagaaaacacataaaaacacatagaaaccttgtaaagatcattaacagatttgcttgaaaattcatcaaccagaacaaaccctccctcagcggcatttaatcagagacctattgtgcagagtagagtaagtgtataacaaatgaatttacatcatcggtccgtttaagtcacaatcaaatagcaccaacaaaaggagtaaactggataggaggattctctttatatctcattaacatttgttagtatttcttttaatacaatcaaacaaaagtgcttgtccatagtattatatttattgacagaagtaagaaaattccttttttttcaataaaaaagtataaaagaataatggaaactggcaggtgttgcatgagtaatccaccaattaataaattaactcaagtcagctattacctgccttaaagggaaagctaatccatcactgcttcttgttgcttacctgcaaaacagagtcttatatcatagccttttgacacaaggaataaagtagtaactaacaggaaattatgtgtttccagagttaaaccaacagaaaactactcaacgttgtaacaagcacgacctgaacatcaaatcctacacatgatgaatccaaaatacttgccttctctgaccctaggcaagatgttttcttttagaaggttacatcgaacatcaaatgactgcacagagcaggtgaaatactgaaatttgtagcaaatccattttgatagttcagttcaatccatgattaaaaatcaatttttggagttcaggcttttacaaaagaaacacttgatcaatgaaattgggagtttacaggatgcctaaactccaaccgtctaaattgtgtgaactctgcatatactgcacagcactccagctaaatatttccattcaccttgattcaggttatatatctgacacaaactcagactggaccacacattggaccattgctggcataggcaagtatcgtaattcatttaagtcataacaccaaagttatggcttaggtcaagaaggaaaaatattcatgctaatttggtggtcatatttctcattctataatatactccacaagtacaccaaataataaatttggtggattctctttatatctcatcgacatttgtacgtattttcgactaaagttacatcataaaaaaaaattccatcatgtaagcatgtgtataaccaggtaaagatcatctttataatctgtcgatgcataagccattcagctcgtccaattacctgctacagctcaccgaagttcccttgcgccgtcagcggtggacaggacaggtgcaaaaacagccagaaggccgacagacgatcgtggcccgatgaagcatttgcatcactctacccttgcttccacccccacatcttccatttccagaaaactaagttacgtaataagataaaatacatatgttaagaacacaactacagaatatctttatcgttgtgtttgtaagtgctgtatagtaaaaagatggtgtggaacacgttagcagaacctgagcccatatgtagaatttgtcgagaccttgattggaggaaatctgctaattatgacaatgataccctaaaagaaagaacattgtttttcattggtgagctcttttttgcattctgaatggttactgctaattcttatgcttgatgcctcagacagtactaataactatagatcaaattaatggagaacaattacctggttttggggttgtccacttgtccagcggtgatgcgacagcgacaatgctcatcttgctggctcatcgacaggaactcgctcgtcgtgtgaatcatgagggcaaggaggcatgacggtgtgagggaaaccagtcgacggggcaatccggcggcggcatgacgctaaccgaatggatcagggatgatctgcaagagggcggctgcaaacaaatccagaagatgcagcgatgtggaaggaggtgacccacgagggaatgatgaggggcgcgatgcggtgagggtggagggaagcgacgcgcaggggagacaaggcgaagcgcagagggaaacgatgcgtgagggagggggcgaggacggaggtgatggcggcgatgatggtggcagacgggtgaaggtggaggcaaggcgcgcgaactcctcctagggcagtgtacagagacagtttgccgacaggaatacccattccctgtacataataacagcagcacacatcagcaaatgctttcaggtaaacatacatcatcacagctaaatcttttcgacatattcatgacagcaaaatcagggcaggaaatgggggaaaagatgcagtacctgacaaccaagatctccaaggccaagaatgcgctcaccgtcggtgatgacgatcacctggatgctcctctccggccagttcttgagcacctcaaggatcttccccctgaatccaccaacaagcaaaccaacaaacacagattcctgtcaggctgcaaattcctaatcaacctcaacatcagaaggaaaacagaatcctcgcaagaaaaccgcacttgtccttgaggctgatgtacaggccctgtggccgcctgtagatgctgccgtacttctggcatgcctctccgaccgtcggcgtgtacaccaccggcagcagctcctccacgttgtcgatcaggagcttgtagaacagcctctcactcctctcctgaaaaaagcacaaaagaaccaagaaacatgacagagtgttcagtaatcaacagttcttgctgcatgaacattcattatcaatgcatttgattttgagcgagtgatcaaagtgcgggtgaaggccagcatcccccgccggccaacctcacccctttctccatcggcgttgtcctattcctcctcccatgccgccgtcctctcccctcataccctgctcaatccggcgcggggtcggctcgcgcagatcgagtcggtgcagatcgggacacctcttccccgcccgtcaccagctcctttctacccgcacctcacaccgccacccctaccggcgttgccaccatccccaacgccgtcgaaaggggatggaggagggaggggagcaccggagccgactctgacgccgccacgaggggagggggatactggcgccggttacgccgccgccgcgaggggagggcgaagaagggggaagggggggaccggcgccagatgatgcacggcggcggcggggggatggcgtacggcgacgacggcggcggggcgacggcgtcggcgcggcgtggcagcgaggcgcgagagtgaggaagggaggggatgggcgtgatagggaggcgaggcgacggcggcagcgtctaggtaggcgatgcgagcgagagagagagagagagagaggatgggagggccggagcccggagggggatgcggcgcgtgagagtcgcgtgattgggggagatcacgcggtagatggaggtgggaggctgctgatcgatctggaccgttcggttttcaccaggaggtgggatcggcggattttgggaggtgggatcgatctcaatcgttcgattttacacagacgatctgaatcattgagtgatgaatgaaagaatgagtgaaactatttgtttaactatagggtagatataaacaccatttaacgagggacaccatagtatttcttctcaaaccttaatatatgctaaacaacagagaattacaattattttgggacggatgtagtactagtatgctgtttaggggtgaaaacggtacgaaaatttccgagatttttggctgtcgttaccggtttatactgaccgtttcaatcggtattagtaattattagaatatcttctagaaatggtagcgtaattaggatagtggtttttcggaccgttttctcgtaactgcatttgtccgataatttccatcaaaatttcgaaagttctctagcggctcagccaacccaacccattaaaagctcatgaatgaagaaagcttgcaacccattaggaaggggaagtggtcaggaaaaacaatgttaactctagggtgtggcatatagactttgttgaaatttgatctcctcaacttatcaatgttgaattattgttcaactttgtttatattgttcgttgaacttatcatcatatcactagtaatcatattacggtgttatgtggagtgtgatgatgtaagaatgaagttataaagtcatcttcatgcatagttaaatgtgtgattatgccagattgttgtttccgagatgaattttcgacttacaattaatatcggtagatttcgttcagacggtccagtttctgatatatcgatattatcgatatcgttactaattttgggtctatcgttccgattttgttttcaagaaaaaaaaatgaaaataaaaatggtagagggtttttggaccattttcatccctaatgttgctgctgtagggctactggatatcgaatcagctcaactcgctctggctcgctatgatactgaacggactctgctcggctcgctttctaactctagcgagctcgtttagcttgcgagccagagcccagtgagggaatggcaatctagagataggcaaggtaaggtctcaaggagtggccagcgacaggctatggcggcaccatgactcacttgcggctagtgctggtctccttgtgctgctacgggcaggtgatcggcggacggaggtatgctggatagcaacaacgatgacacaaggtaatttagtatatactgtacatagcaggcagttaacaaccggcagggcacgggatgatgcgaggtaatccctccgtccaaaaaaagacaaaccctggatttccgtgtccaactttgactgtccgtcttatatgaaatttttttataattcgtattttcattgttgttagatgataaaacatgattaatattttatgcgtgacttgtctttttaatttttttcataattttttcaaataagacggacggtcaaacgttagacacggaaaccaaggtttgtctttttttgggacggaggtagtaaaggagaagtgtgatgtcagtgtcaggcacgacagagcagcggtgtgatgtcagtaggcatgtcacaaggtgatattaggatgaatcttgacataggataaatttttaactcatgataacgtggacgaatctcaaccgttagatttattttggagggccaagatttaccctatatcatctcttgcgacatgcctatcctatatcactgaatctgaatcctgagaattcacggtgcaagtgcgagaggaggcgatgcaagagacgagaaacgcactagtggctcaaacgagattggtggcgccggggtagataggaagaaattttacgaccaaagatgttgggataatgagcgttgagacaactgttgtgcttggctgcctggctgagccttggcttgtttggctcatgatccagcctgagcttgtaaaaaagtgctactaacgtaccaagccaaaactgtcaaccctgaatcaaactagctagatgcttttcgttgttgcagctactgatagtgagtactctgtctgtttcataatataagtcattctagcatctttcatattcatattgatatggaaaaatatttatcaatatgaatgtgagaaatgctagaatgacttacattgtgaaacggaggagataactttttcatagagtgcttatttacccttgtttttactaactatgttccagccaaaatgtaagcatttctatttaaccagacgtatggaatgttaggatgaaaacgctcacaaatattcatgaccgactaacgctgtttttcaatttttactggtaaagtaatgtggaaattgttaccaacaaaaacaaaaacaaaaagatagaaatgataaaaagtacagaaatattgaaaacagagacgattttgatgtatactgagttactgaccgtttctgaattttactacatacttatggaaattaccttttctaattatggtaattactgtattttaaatactcaatatttattgttcatttctttatttgacgtatagtttagaggcccatcaacttctcaattaaataagtactccctttcgttttatacaagactgatatcaaactttaaaactttgactatgaataattttttaaacatttgccttagaaacatgatgaccgtacgtatgttttgatattttatatatatattattatagaaaatattgatcaaagttaagttatttttaagattgtgtccttatccagataacaattattttcaaccaggaagtgcaaggttaaaagggagacaattcataatttatatagcataaccttgaatttatttcgtcatattttattgtatggacgtgactacacagttagtggtagctggtttatctaaaccagttaccactccatctataagcgaccatgtccacctatacttcaaataaaattttctcttaaaccactcatccgattacaccgttgtgttcgtaacaattaaatctttacaataagatctcacatgattatattttgataaaaaaatacaaattaattttatatatatctaaattacttcttatatatataaaagtaaattcaataaaaactaaaagtaatttacatatattatagaagtaacttataacaaaattaatgtaactttaatgcatgcctttttttcaaaggacatgactacacagctagtggtaactagtttgtctaaaccagctaccactccatctgtctcctttcaacttgaaaaatacaatagtatgtatctttttttaatctctttaataacttatatattttaaatcacatattgtttttaagatctatttgcatcattgtactccactcaaaatatgtgacaaaacaatatatgtcggagatatgggcccggggatatgcgaagtgaggggaatctaccttcccatcctgccacgtgtccctactgcctggtcctgtccccgcattctgcgaaccgcaggagcggccggggggtcggggcctcggggtgccacgtcatgcccctcgggcccttgcactcctttgccccgaggccctcgcctagccgccgtttggcggggggagcaagcgaggagggggcccaggctgaacttcctttaatgcgcgcaacgccccaactgccccctgtcgcatttaatgtagtggggcagatgtgcggcgtgctaaactgacgcgcgatggtcaagaatgaccagtctgtgaccggcctgacgccggtcacgtctgactggacggacaaccgtgctcccacgtcgcatctgcttccagcggagtggaggtaggtatgattcgtcccatcggggggtcattcggacggcggccaccacaagtcttcacctattaatgagggaatgacagggctgtcccccgtgtcaggcgagggacggcgctgggccccgctcaaggacaagctgtggtttagcttccaggcgaaggcacgggtcgagttccagtcaagatagggtgggtccctacccgaaagaagagtaggtagaggcggtgcatgtggtattcccttgaggtataaaaggaggactttgcccaccgagaaaggggacgactctcagaaaacctgagcttgtggaggagggaactaagagtgttctcccgagtttaggaacccttgtaactctcagtctaaatcctatacacaggagtagggtattacgcttgatagcggcccaaacctgtataatttggttgtgtgcgagctagctaggagccttggggacggatacgcgatttctagaggcgagcttcttcccccggccgaactcacgaaaggagggtctcacgatctcccgctagagaggatcattcctcgacaatatccatattgaatatattcaaacattttattaatttaaaagtaatttattacatgttagaaagtatcaggaagtatccattacatcttgtacctatgattaattctcattagttattccatcaatgttatttacaacccatcaaaggttttatcttcttttctcattctacattaaaacaaaaatgaaaggaaaaaaacaatcggtgattaaacaaatttatatatagttacttctgaaccatgcaaatgttactttcaattaacattgaagttacttttaaaaattgttaaacttacatgtgctgatctgtgctgattaaatttaatttctagatggagtcatatttttatccctacaacgaatttacttctaatgtcgtgacaaagttacttccgttttatttttaagttacttttctaatatatgtaaattacttttagactttattgaatttacttttatatgtctaagaagtaatttagtcaaatttaaaagtaatttatgtatatgataaaagtaaatttcatatgtaataaaagtaatttacaaatataaatattttttcatcgtaatataataatgtaagatcttattctgaagatttaattgcaacgagcacaatggtgtaatcggattatagatcggataagtaatttgagagaaaactttataagaaagggaaaaaaaatgcatgtgtaatgaaaaaaggcatgcatgtgtcacacggttgtgtaggtgtcgcgcgttaagactatcgcgagaggcctcgctagatagattatatgtttaaaatagaagtattcctagttatacatctaaacgtttacaatcagaaatgcttagcagatagtaaaattgcttccgttctcttatagtaatgaaaacggtcataaaacttctcaaccattttcataaccatatttttctcaaaacccaaaaatagaaacagtattgagaatatgaaaaaccagaaactgaattatatcacgtaggtatcaatcagaaactggtaataatatcggaaacattgaattgtaaaaccacatatttagctttgcatataactatctctactactttaaaaaataagaggtgcttccatcgttcgtcaaaaagaccgggcggaaaaaatagagtgaaaaaaaaccaaatttaaccgatccaaaaaaacaggtgaaaaaaacgtgcgaaaaaaagaaaagaatccgataaaaaagggggcgaaaaaaaccagacggaaaaaaccaaatttgtttgaaaaaaataaaatctgtcagatcaaaaaaggggtgaaaaaaaggaaaagaaaaacgaatccaactccgtcaacgcggtaaaaaaaccgagcaaaaaaatgataaaaaaaaccacgcgaaaaacaaaccgtgcgaaaaaaaaaccaaatctgtccgatccagaaaaaaaaggagcgaaaaaaatgaaaagaaaaacgaatccaactccgccaacgcggtaaaaaaaggacaaaaaaaatctctatctctacttatctctactattataaacattgaagatgtttttgccgtcatccgtgtttaaattagttttaattttattttcagttttaatctctatatctttatctctacttaaaaagaataagaaatttccaaagtcggtaaaaaagaaaaagaagtccgactaaaaaggtaaaagaaaagtccgactaaaaaaatgataaaaaagcttctatcgttgtaagaaagaaaatcgtccgactcaaggaaaaaaaagtctcgccagtaagaaaaaaaagtccgtttgtgtttttttaccggcgactttttttttcacgcgaaagagttttttttcctgcgcacgcgttattgttttttttgtccggttttttaaatcacaccgcgcctcgcacttttggttttttcgacaatttttttcaccggttttttatcccatacgattttggtttttctcatctggtttttttaatccgatctattcgcggcatgtctaccgagttgaaccctggcgatgcgctagcgccatatcgatcgtgcgttttcacttcaatttgattgcaaaaaaaaaattcgattcctactcgtccctcatcattttctctgtaattttccttgctttattttgtcggatttaatctaatggttgccgatgatgacggcgatcttccccgattatttttatcctgagttttatgctctaattttgggtaaaacggaaagaggtgagtggccggataaaaaaccctcaaccaattttgagtgatcgagaaagattcgtccggattttatgggtcgaaggaagcaggccaaacgaaggaggtagcagaccgacctagggctaaaaagtaaaaacggcttcactcgtggctgggtcgaaacaagcagcctgaaaagtaaggaatgcttttggcctaaaacccaagaaatattttcattaactttttttcattataatatatagcgatcccgatgttaggattttcattaacttttttaattataatgtatagcgatcccaatatttcaatttattgctcagctcttaatataacattgaaaaatcgtatttacccgttgcaatgcacgggcattttttctaatatatacttaaaaagtaaagaaatttccgtcgtccgtacagagaaaagaaaattacgcgcgagtaaaaaaatgcgtgcaaaaatattttctgtccgattccaaaataaaaaaaattccgagcgaaaaaaaagtttccatcttcctacaaaaggaaaaaatagtgcgaaaaaaaaagtttctatccgaagggaaacacgcgcgaataaatacctaattaaaaaataaatatctatatctaaaaaaccttctgtcgtaaaaaaaagaaaaaaaaagaccgactcccgtatagaaaaaaaagtccgactcctgaaaaagaagatttctcgtccgtaataaaaaaaaggaaaaaaacatccgactcaaaatccgtaaaaagaaaaggaggaaaaaacgtcccggccaaacctaaagtcgcctcttgttgtccgtatatatctctttaactctaatctaatctatcgatctaatctaactttttaaaaagagaagtttccatcatccgttaaaaaggaaaaaaatgcgcaagaaaaaaatagtttccaaaaaaatgcgcaggaaaaatacggtttccttcgtctgaaaaaaacaaaaaaaaatgctactaaaaactatcagaaagaaatacaccatttctaaaaaatgtttcaaaaaaccacacaagacaaaaaacaccatttatagaaaaaaaaagccgctatgaaaaaactaaccgatgaaacactgtttataaaaaaaacagatcaaaaaacaaacggactcaacgcgcgaaaaaaccgctgtttcaaaaaaagttcgagaaaaccgttgtcacaccctaaaaattcaaaatatataaattgttgtttaaatggaatttttagaaataattttaaaagcctagaagagaagatctaattttaattaataaattccaatataaaatggggccagataaaatttcattaaatactttgattaattctataattcctagattttttttgggatttatttgagctaaggaagtatttttaataaatggaattgcatttaagaaataatttaaattgaaaaaggttttaaaaagtctcttttggctttgggccgaaagtcggcccaaatctcttctctctctcctcggcccaagtcggcccagtccgccgcccacgcgcgcgccctcgctgccgctgacaggtggggtccgtgtcacaccccgaagttttcctcccaagccaaaattgtaatttttataaatgaccctaagaaaatgcagatgaaatcaggagaaaaccctaagaaagtaatgcaaataataatcggatttgacatgtggaatttttcttgagttctacatgtcgaaattcattaacaggatttttagtggaattttcagagctctagaaataattttaaccaattaaaattgagcaagcaattttttttaattccagggaaaatcctttttctttttctttttcctctctttttcctcctttttttcgaatgggccgccggcccattccctccttccttccctcccccttactgggccggccgctggccgaggcccagccaggccgtcccgccgccctcctctcggggtcgccgacaggtggggcccacctgtcgggcccgtctccctcctcccgccgatctcgcgctcgcgccgccgcgccgaaaccgccgccgcgcccacgtccccgcctccccgggccacgtcgaccacgcccgcgcgtgcgccgcgtctcccgcgcccactcccctctctctcccgctcgcgcccgcgcccgagatggccgggattcgaaaatcgaatcccgcctctctctcttccccactcccccacgtcggccggcgattcccgcctctcccggccacgtccggttctctctccccctttttaagcaccgccgtcgccccctctcactttttccccatttcgccgcactctctcgagcctcccatcgcccccgcgccgtgcaacctccgcagccgccattttccgctactccggccgccgctagccgccgttagggtcgccgccaggccgcgccgtcgccgccgtcggattcgcgtggccgagatccaccccgtccacctctcctccgtcgaggttcgccgccggagccctcatcccctcgcgcacgggtgagcaccacctccaccgtcgccttcggctatggtttccgatcgccgtggtccatctccctctctctaatccctctcttctccttccttagggcaccccgaagctcgtccgctcgccgacgtcgttctcccgtggcttgccgtcgccgttcgccatcgtcttcctccgcgccggccaccctcggtgaggcacccctcccttcttttccccttcctctcctcttagtgtcgcgcgccgtcgccttcgactgccgccgccgcctcccgtgccgccggtcgccgccgtcgtcggccgcgtgccgttgccgctagacctagccggccggtcggttttgatgccgagccgagccggcggccgcctttatcgctgcccgtttcctccccttcctagccgccgttagcgcagccgcctccgcatcgcctttgcgccgtcgccttcgccggcaacgcgttcgcgcgcgcgcacgcgccgtcgccgcggtcggtcggccggccgtgagccaagccgagccggtgccgccgccccttctctcccgcgccgctgaccagtgggtcccgcgtgtcggcgcccttcctccctctcccgagtcgctgaccggtgggccccgcatgtcggcgccgcgccccgtgctgacgtcagccctggttaatattgcgcaataaattatttaaggatttttgttatagtaataaacacagtgaatcttctaaaattcataactaattcatccgagctccgtttaatcccattcaagtctcagtaaatcaagaaaaatgtgtagaatccattaaaaatgattttgttccctgtttcagtagtcttatagcctgtttgcaatgtttgctttgtatgtcgctagattccgatccttccgacgctccggtgtactttgagatagtcgccgaggttcctccagcagcagagcaaggcaagtcatgcttgtcacttgatcatattgatcctatattgcaaatgtcctaatgttttctttcaaataccgcatttgttttgcaatattactatgggatggttacctattgttacagccatgctattttgataccatgctcctttgttagcttgggttataacatgattagagttaggactagggtttgcttagccatgcttagttcaactagcacacaatggggagatctcatttaaaacctagactataggtttatatgataatgttagattagtgacaccgctttggtgttggttaattaaaatgaatcacatggtgggctgtgggtgcatggttttgctggtcgcacccatggcagttaaggaccggttcgcgggatgccctggaagaattcatcgtacttaccacaagccagcgtgggcaacggctgggcttgtagtgtggctttcctctagccgacgcatccaggcaagggtgggcgtgatggagtttggatgggccctgcgacggcctatgcggcttccggattcacctaggcacgagaggggactgcccgctgccttgcgaggagtgggggtgaaacctgaggtgtggtgtgcttggttagagggggttatgcgaatggtcctgtcacggcctctttccgggatgtcgtggtggcatgtcggcgcacggaaacgtgtcgtggggctgtgtcttgtgggtacagttgtacacctctgatcagagtaaaactattcgaatagccgtgcccgcggttatgggcggtcaaccagattcaccgtgattagactcactttagtttagtctaatgaatttggatggtataggtggatggttgggcctgtcgcaacgtgggttagcgttggacagcagatggtgaaaattaattaattttttttcaactgtttaaatctttcaatttctgtttataaatgctcgctttatgccaatgaaccacttcagctcttctttgttaattccctgcatcatacccccgttccggtatgacttgctgagtacagttggtagtactcagtcttgctctacttttcccaaccccagagttcgagttcgggtcagatgaaggtttctctgaggagtaggcttcgtctgtgccgtcgaggatgcctgtggagtggtgttcccgctgcagtttagtcaaagtttagtcaaggcttagcccctgttgtttttcttttcttccgctgcatttatgtaagactttatgatgtttgtaagacgtggatctgtatgtcaacattgtcgtttgtgtaccccggctggtcctggacggggattttaatgcacattctgcttggaattctattcgggaatttctgggcgtgacagtccgcctgtcggagtcgtcgtcttcgtcgcgccgtcgcccggccgaaccctagcgcgccgccgccgccgttcctttccaaatctggccgcccctttccttctccggccgaattgatagaggggaaatgatcctcgggatctcctctaccttttctcttttggaaacatcggctaattcgttttggaagttcgtggaatcgagttcgattcggatcggcctctttcctccgaaccccgaagtttccttctcgtcgccggccgccgtgggccttcgccgccccctcctagcccctttaaaaggacccccggtgtctcctctacccgccgccaccctcgccttcgcctctcgccgtcctcgtccgccccttcgccgtcgccgaagatcaccggaacaccgtcgccgccgtcgacccgatctccgccgccgtttcaacctcgtcgccgtcgccgtccgttgatcttccgccgctcttttggtcaccggtgagttcgccgcgtcgcgctctacccgttggtgtcctccgttcgtgccgaagcgccgccgttcgccggcgagcgtgcgccgtccgagccgccgccgccggtggtgacgtcatcgccgacgtcatcgtcgccctctcccgtgagccggtcgtagaccgatcgatctcggccgtccgttttggatcaagtcgatctcggccgtccgttcgcgtgaaccgtcgccgtgcgcccggtccaccgaaaccctagcccgctgacgcaataaatctctttttccttttcaaaaataattcattattgcgtcataattcaattaaaatcagtttaagtgttttaatccgatttaatctttaaaaattcataactaattcatcttagctcggatttagttggttcaagtctctaaatttttctaaaattgaggtctacatgttaaaaatatccacatgtactgttcatgcttgtttatgtgctgttttggtgattttgcttctttctgcttagattccgtcgtttccggagattccgtttacgccggagaagagtttgaagagttccaaggccagcaaggcaagtcacacagatcccaaacaaccctttgagcatgttgatcctatttaaagctattgtttctattcaactattgcatttattttcgaatgtcattgggtggaattaacctattgtttgttatagccctttttgatcttgattactttattccttgataccttgggttattataatttgactagttgagctttatttatattggttcagctagatattagatataattgcttagccctgcttagaaacattagcacattattgggataacttatgactcactattatttaatgatttcacgatggtcaatcgtgattggttaattaattaatgtgccaactaaaacctggtaatggtgggttgtgagcacatggtcttgatggtcgtgctcatgacaattaaggaccggttcacgagtttcggttgtgaaacattaaccgtgccaaccacaagccagcatgggcaacggctttatcttttgtatagcatggtttattgcggggcaccagactgagaagtggcggagataagcccacgggggtcgctggggagtccatgccttgtttataagggggtgattatgatccaggaaggtgcgctgcggtggattgtgttatgcaaggggtattgtcacaactccgttccgaggtaccgtggtggtattgaggcacatggtgacatgatgtggggttgtgtcttgtgggtacagtggtacacctctgatcagagtaaaactattcgaatagccgtgcccgcggttatgggcgggtctaacaatgtctttcgtgattagtctcacccttctcaccatagtaaatgatgctataactggtaataatttgattagctcctggtttggaatggtatattcctggtttggagatagaactgtgcagccgggatggttgttcagaatggttgggcctatacaacagggtatgttgtgtagcgttggattaatattgattaattattacttaactgttttattaaattctgaaatgtttattaaaggctgtttgtgcaaatggaaccctactatgccatcctttgttatcctgtgcacttgcatatttgctgcgtggcttgctgagtatgtcatatactcaccttgcaatcattcatcagaggaagagttctacaatgaggctgatggtgtggaggattaggtgtagccttggtcaagctgcctgtggagtggagccgtctgcgccgtttatcttattttccgctgcttagatctttattgattgagaggaactatctacctctgtaatgaccttttattcgcttattaattagagtaataattgtactctattatcaatttgttattgtgtgcctcggctgattcctggacgagggttcacacacatgtaagcgtttggaattttggatagaaattccgggcgtgacaaccgtccaacttaacgcaagaaaaaaaaccatcatttccaaaaaaataagttagaggaaaccatccaactcaacgcgagaaaaaaaccgccgtttataaaaagaatcgctctgagaaaccgtccgactcaaagcgagataaaattaatggacgcttgggtcggataagatccatcgattttttttccatctcctacacatcatttgtttcctcacctaatctcctgcattggagaccctgcacttttgtatgcaattatcattatcagacttttttttaagtacaactaatattcttaataacatattatatggaaatagtattaaaaataaacatatttttaattgttatttagagaagagtgcacggtgactattttgtgtagactttatcgttagtgtaggatttgattaacctattattggttgcaagaataagattgaaagaatattttagattatatgtatattgttatatgaataatctaattattttagttaaagcaagcattggtaaaaagattgccattatcgagtttgggtcattacataaagatgctctaattttctaattgtgttagctacaacgatccatataaacattatcattgatatgggtatgcttgaaaaatgtctattgtcattggattattttttttacccgttgcaatgtacgggtattttttttgctagtactattttaaaatagatgaagtaggtacctgttcccggtaatacacgagtgacggaacaccatgactcacttctacatagatctagaagaggtcttttttttcaatatggaactagagcagtgggcagctcctaatttgggtggagattaactccaggatgtaacaccaaatgcgctgcattttctcaagaaaccgaaaaacaggcattgactaagagtctattgcttaacgttttggagtttcttgaaatgcagagctgaaactcctcttcaagttaattgctttgattagagtgggtgattaatagctcaatgtgccacatgtagtggtaactctcgtgcgtgtgcagcttatatatgctgccttcttgcattctgttacgttctgttctctgaccccttcgatatggagacgaaatatagtatcttggagcttctgttggtcagtgccgagggcctgaaacatgctcatcacttaggtctatattcttcaccctatcttgtttcagaaactctaatgctcatgacctccgattttgctcattggcatggaatgtttgcaggaacgcaaagacactacgtgaacattcagttcggggaccaaattttcacgagcaagatcacacaaggtatacattcctgtatatacaacaatagtcaattgtcattgctatcgatagggaaaatcttgctttgacatctgcaagaaatgccacttgcaagctttgttcaggtaaaggtaaaaaggtttggtggaacgagaagttcagattcccgttgtcatcggatgaatgcaaagagcttgcaaaggtcacactgaagatcatggagagggataagttctctgaagacagtctagttggggagacaaagtaggagattgtctgagataaagccgaaatattttaactgaaattaatcgtggttactgagactctcaacatttgcatcttgatgctgtgcgtgcagggttcatgtcggcgacatcatcagcgagggcatcgagagggagttcttgcagatgaagcctgctccctacaacgtcgtgctggaggacggtaggtacaagggagagctcaagcttggcctcaagttcctccccaatgtaagcacgcacagaggtcgctcacatcgcatcaatgacaatgcgtctgaagctctcgatcgtgccagtatacgtagtatcttcgtaggcatttgtcttgacctggatgcgaatcgcaactgtgtatgtaggtaagcttggagagcctggagcagtgcaccgtgccgccgcggaggcagacgagcgtcccgtacaggccttttctgaacatcacgctgccggacatcccatggaggaggttattcttcttctgcacacgctccaatgccaaaggaagcaggaagacgaagaacagttgatccgttgccatggtcgtcgcaaagcccttccattttttcttgaaatttctccgtataccctttggagctagctagtggtgtgaactgtgaagtgtctatgacttgcgagctttgaggtgccgatatgtttagaatttagatcaagtgggggttttaaattttgtaaatggaaatttcttaaaatattccgttaagatcagatttgtgattttttagtaaaaagaaaaagaaaagaaaaaacattaataaaaaaagaaaagaaaataaagatgccctgctccgtcggcccgtccttgctttggacttgtttggaccgttcgctttgaatcgaacggtgcatacgcgctgggaataaaaaaaaacagagcagcccacgcccaagttcgcgaccccgcttcctctccccttttctcctttcggtgcccgagtgccgccgggctcgccgcggggcggcacgctcgaaacaggtggcggcggagatggagatgggcctcgaactccaaccagctgcagcgccgtagtctcctccactcgcgagaaggcagagggggaggggaatcggcggagaccatcgcagagttattctcctccctcctcttggaaggctgtgaaatcctccctggcgctgctaagcctccgagctccctccgagcttccgagccatctcaaggtgaggggaagttttttactcaaaactcgcaagctacactcccgtagttgtatccattcggtgaggcgctgttaggaagtttactatagcacgtgtagcttacgagttagtcgagtctgacttgcgcatgtaggttgttcgacgaaatgtctcttagaatggagttgtttagatttggggctagtcagattcaatgccaattgtagaaatggtttgatagtttctactagttttggtggtagattgcagcttttggctgagaaaataactagtactttcttcaagtgagtgctgcaatacaatagatttttttttggtgctgttcttatcaatccaccctaagtgtttttgctgctgttcttatcaacccaccccaaggtctttgctagtgagatgattctatttttattgagaaaaaaataaattctggtactatacaagaacttcagtgtgctaaatttgctctatcatttcttgcctctagcagatctcagtcagttgattactagctttcctttatgaccttgctgctagcttgtaaaagatgagctcaaaatgtggagctccaaaagttagaaaaccaacaatcaattaccaccgtcttccattagatggtcatcagtttgatctggatgcatttcttactaaggatcgtaatgccaataaccaatcgaagccaagtactcagtcaggaagcaaatctatagatagaagattaaccactccacagttagtatcagcattgactgggatctggaatcttgtcggccagccagaatcttccggcacagctcaaatatccgagagccatgaaattctgcataaagatgaacctgtgtgcttcagcaaagagcaaaaggaacatgcattgatgtcttgctgtgctgaaaactcaactggtctgagctctcaaaactttttatcaacgccaaaatcaatctttgaagatcttagtttggtgaagaaaatgttaatgctcacatcatgtagcagcatggctggtggctcttctacatggagacatgtgcatgttgggagtgcctattatttaaagtatcagaatatatatcccatgcaaaccagaatgatgcacacctatgctgtttctggcagtacggaatttaagaaggatcaaagctttagaagggacgataaccattccagccaaacaagaaacatgccaactgagctatgtactagctccagtgaggaggctcacatttacgaaagttctctgcatggtactaaatccaatctagagattattccagaatattgtagttcttcatcttgttcgtctcagcaaatggtgacttgtgaagagacaaggataatgccagcagaccaaatttcgagtaacacatgcacacttactgagaactcagtgtgcatatcttgtccggtgggtgatgctgtggttattaattcagaacacacagatcaaaatgttgatggtcttatgtctcaggagcactctgtagacaagtattcaccacagctggaatcatctgttcaacatcgattttatggtgctgttaatctgaacaggcatgctgtggcaggagcattagctggcacagtagtcagtgtttctctgcatccaattgatacagtgaagaccattattcaggttaacagttctcgacgaagttcattctaccacacgttaaggcgcgcccttgttgagagaggtagtgtatttggatgaattttacgcacatcaacagagatactggcaactttgatagatttgatttatttccactttctcttgaattgctagacctttttaatgcttgacaaatcctatacaggagttttaggactttatggagggcttgctagcaaaattgcttgttctgcaccaatttcagcaatctataccttaacttatgaaatagtcaaggggtctcttctgcctattttgccaaaggtgacaatatgttcattcattcattttaattttttggctcatgtctatctagttttttgtttaccacagattttaattttgtactatgttgttacaatgccatttcttcaggagtatcattcaattgctcattgcactgctggtggttgttctagcattgcaacttccttcgtttttacacccagtgaatgcataaaacagcagatgcaagtgggttcacagtatcagaattgctggtacacaatctcttgcctcattcttataattcattgccactgctacgtgccttgtttctctattaaaaaaacacctcgatttcaatagaaacatgacactacatttttcctcatccccttatacaagtttcatgacttcagggatgctttattaggatgtcttcgaaagggtggcattacttcactatatgctggatggggtgctgttctttgcagaaatatcccacattccgtaattaaggtatttcaaaagtttagtacctaatttactttcagatttgttaattgtgtttacagaatactggaaggccttgtttttctattttacagttttacacctacgagagcctgaagcagttcatgttgaaatcagctcctgctaatgccaatcttgattctgggcagacagttagtaccctgagctataacttgttaaaccgtctttgtgtctttgttatcattagtcaggactgaagttaaactcattggcattctcactactaaattcagtttttttctctaatgttttcgtgcgtaatacagaatttaaattattttacattatgtttagatcatagtgtagtatcagattttgtttcatcagtaaggatgtaactaaactacacctattgttagtatatttagcatgtttgatgatgccatgttaccagttcttgtatttgaacaaacatttgcccagaattctagtcggtagcatatgtatacttcaatatatgtttgtatgctagtgctgaaagtgggtagatgaaagcctgattggtatgactgtagattgtactgtaaggtatgcactgtaatagaagcaaagtctcgtgacttattaaacaaagtctatttgcagttatattatgcacataggctgtgttcttttgttgggaactcctttcctatgcacagaaaacaaagcacggattaatgtatgattaattaagtactccctccttcccaaattgatcatcatatatgtttatgcatcaagaccaaggataatttaaatcacatcatcaagacaccatgtacacattctctcataatgcatgcatcgattaaaacactataccaattacaccttagcatgcactcattctcccatgctgcatcaatcgtattctgatgaaattcgtgtccatgccatatgatggtcaatttgaaaaattttgaatttcattatatggtgatcaatttgggaaggagggagtattagctagtgtttttttttttttgaaaaatggattaatatgatttttttaggtaactttcctatagatttttttttcaaaaaacacactgtttagcagtttggaaagcgtgcttacggaaaacaagggaggtggagttgggaactcacgctaaagaacacagccgtattctgtttgttctttgttctctgcttggatcagcaccgcacaaaaatcactgccaaaatcattgatattttgcattgcagcttttctgtggaggttttgctgggtctactgctgctctgtgtacaactccatttgatgttgttaagacgcgagtacagttacaggtaacataaagcatgctttatatctgtaaatcattatcatcaattaaattgcttatctggttttactggctgaagtcacacgttggtcttttcaaaagtatagttgctggtatgttattggaagtaaactattggttacagcagaactaaactgagtattacccatgtttgttaggcactcagccctattagcaagtatgatggggttcttcatgcgctcaaagaaatttttcagcacgaaggcttgcagggtctttacaggtacggtcatttccgcaccatattggccatgctattgaatttaggttcttatacaagtactcaaattattaagcaacatatgtatttccaggggtttggctccaaggttggctatgtatatatctcaaggggctatatttttcacatcctatgagttcctcaaaacaattatgttttctgaacaagagcttcatgcaaggaacttttgatcacagaatgatgcagcgtggttcaggaacacttaaagcatctgagtttcaagaacaatctcatgaactaagtgggatggttctattaggctagaggattgtagacttgtggttactgaaccaaacatttcttaggtcttgatagtaaacatttgtacaagtgtacattacatttttggatacataggcaaccaaactggtgagcagccatttttgagtagaaatcacatctaggaaagcaaaattttgtatcatcaacacagtttgtaaattcccttacaagcaacctgtgactggatgtgcatcctaattcctgatattgaattctgacagaaaaaaagaaggcaagtctttttttacttgaatatatctgctgcacagctgcacttacatacatacttacatccactcaaaggaaagagaagtagtacttgaaggtagccctcctagcagctctctctgtgttgctgccttgtgcatatgcatgaaacacaaaggaaatacgaagcgcaaaaaggttcaagaagcgaccgacggcgcgtgcggcctcgtcgcgccagcgtgccgcgcgaacctgaccgagaagttggcctcgcactcgccgtcgccgaggcccccgttgtcgaagttctgggagtaaccgagcgggtcgtagttgagcccgctggcgctgaggacgtacgtccgcaagcgccggcgaggaaggccgatccacctaagcctccgccacagcgccgccaggccgaggccgaaccgtccccagcaggacgcggccgcgcggcggctgcacgacgcgcgcgtcgccgccgccgccccctcctctcccatcgcccggaagcgtatgcgaagccgaggagaggcggccgcagaggacagcaccgcgttcgcgcgcgcgcgcgttccagtcagtgtgacaggaggtgtggactgtggagtggagagcgttgcgccgtatggcccgtagcggcgtcacggccgcggcatggggtccctgcaattgatgcttagttcctggaatcttggtcgacgtggggaatcacctgcactggatgcgctagtatatgtgttgcaagttggcaacaattgaacgtgagacaattagacaaaaaacgagcctggagtcggtaattctctctggcaaaattggcatccgcgcgggcgcaataagacagttacatttatcttgtgatgtgaacatttgtggcttctcgttggtgcttgcagatggagacaaacttgaaaatgacccttttcccccctcttctgatgaaatgaagtgcatttttcctacacgggacaagaaaccgtttatcggatacgggaggcagaaattgactccaagtccaagctgacgaactgaaccaacgtactgacatacatctccaattctctccatctccctcctttaccgtcaccgtgagaagagctccgggcagcgcggatcttggaggggcaccttgcgtgggtgtcagacaagcacgtcgtgcgcagagcggtatccatctcgacgcagcacaggaacaattaaaaccaagtgaaaccccgtgcattattttgagaatttagtatgataacaataaaaaaaataacgtgtaatatagctagataacatcagattaagtaaattaatatggtttatgctaatttaaatttaaatagtatgtagaatggtgatttaaacataaaaaacaaggtgatatgactttatggaagaagaaaagtaggagatagtttggactgtagattaaacatctaaaggctaaaaacaattaatgtgatatgacttaattagaggaaaaaaaagaaagataatttggaccatagattaatcatttaagcactaactaagtgaggatgaactatataagtatatagaatatcataaaaaataataaagatatacattgaaacattatatgaattatgttggttgataatttaacatgtatgtatttgaaaagctcttaaattataaaaactataaagatataacatatttgtatgatgtttaaatatgatgattgttagtggatgataatgtggcatcttgttaattagtggattagtggatgatgatgtggcatctttgcatgttaagcttaaggagttagtgggggataactttatagaagataggattaggaacaggtataactcaggatgtaaattaggcctggtttagatccaaactttttcttcaaactttcaacttttccatcccatcaaaacttttctatgcacacaagcttctaacttttccgtcacatcattccaatttcaaccaaacttctaattttagcgtgaactaaacacactctaagtgaactgaagtcagaactcagaacattttcagaggttacctgacagtagatgagataatgagatatgctgaacaaaacgttcatgtaaaaaacgaactcagatattgagagctggcatgtactgcagactaacaccaccaagaagaaaaacgagaaaaaaactgagattagctctgcattaggctttcttcggtttagcatgttcttttcttttttgtaatggttacatttctgttaatgaaaatggggggttacacccttgattaaaaaaaaaaggttcatgccaagttgttgttgtgccaaccttcctaacaaaaaacatttttgttagccattctgcaagctgagagatgcatggagctgaagtctaaaccacacgatgttaattacagcccatacaactataggatatggattttcatccctcgagaggatgtcctctcattgtttgcatgtcatttaagtagttataatattttttaaaaaaaattgacaacatagattaatatgaaatatatcattccacaaaaatgcaagcctaaatttaacttctataagttgcaaaaaaaagaacaaaataaactaaaaatagtaatcgcacattcaattcgcagctatatttgttatttttgttacaactttagaagttaaattttaacttgcatgtttgtaaagtgatatatttcatattaatctatcttaccatttttttaaaaaaaatttatgactagatggcatgcacgaaatgagggattccctcgagggataaaatcactttctcacaagtcacaactttacatgtactgtatgttggtagcttattagcgtgcatgactgcatgggtatgtagggtagatcacccattaattcatcgtggatcgaacttacatacgaaaaggtaaacacgaagtgtgaccactccatatgaaataaatgttgtgaatacaagaacgatgcttgttcgcacttaagagctctcaagtaggagcagatacaaatgctctcaagtaggagcagatacaaatcaagaattgagcttgggtattaaaagcgaggagataactgcatttatgctgtcattactcatttccatagtgtgcagaattatctaccatttccttccttcacaatttcgcatgtggatgaaggcatgaagctcaagcgaagcgtgacggaacttgtggccgcaagctaggaaccttaatggttgctatattaaggctgttcatcgtgcaggcacaagttcatctccatgcattccagtaaagaccatttttaggacaaacacatcggtttcaaaaaaaaaaaattaggacgaacagagcaatctcttcgcatgcaacagcggccgccattttccctagattcaccttccattggtagcttggttgttcaccaatggcgcacttaggggcggtcctctgcatccgtgttgctctcgtcgtcgtcctcctcccgtcgcttctggcgaccgtcgccgtcgcgcacaacgacaccggcgagcacaagaactacctcatcatcgtgcgcaagccgtacgagtacgaccacaatgtgtacaagaccgtgtcgagctggcacgcgtcgctgctggcgtccgtgtgcgacacggccaaggaggagctcgccaccgaccccggcgccgagacgcggctcatctactcctaccgcaacgtcgtcaatggcttctgcgcccgcgtcaccagggaggaggtgtacgagatggccaagaaggactggttcgtgaaggccatcccggagaagacgtacaagctgatgaccacgtacacgccgaaaatggtcgggctcaccggcgccccggcggcctaccatggcggcttgtggaacaggagcaacatgggcgaagggatgatcatcggggtgcttgacgacggcatcgccgccgggcacccgtcgttcgacgcggccgggatggggccgccgccggccaggtggaagggccggtgcgacttcaacagctcagtgtgcaacaacaagctcatcggcgcgcggtccttcttcgagtcggcgaagtggaagtggagaggggtcgacgacccggtgctccccgtctatgagctggcgcacggcacgcacacctcgagcacggcgggcggcaacttcgtgcccggggcgaacgtgatgggcaacgggttcggcacggcggccggcatggcgccacgcgcgcacctcgcgctctaccaggtgtgctccgaggacagaggctgtgatcgggatgacatattggcggcgatggatgacgccgtggacgagggcgtcgacgtgctctccatctcgctcggcgatgacgaggccggagatttcgccggggatcccgtcgcgctcggggcgtacacagccatcatgaggggcgtctttgtcagctcgtcggccgggaacaacggcccgaacccattgacggtctccaacgaggcgccgtggctgctcaccgtggcggcgtccacgaccggccggaagttcgtggccaccgtgaagcttggcaccggggtcgagttcgacggcgaggcgctctaccagccacccaacttcccgagcacgcagtggccgctgatagcggacacccgcggtgacggcacgtgttccgacgagcacctaatgaaggagcacgtcgccgggaagctagtcgtgtgcaaccagggtggcaacttgaccggactccggaaagggagctatctacacgatgccggcgccgccgggatggttctcatcggccctgagttcatgggctcaatggtccaacccaagtcgcacatcctccccgtggcgcaaatcgtctacttgtcgggggaggagctcaaggcctacatgaaatccacgaagagtccgacggcggcgctgatctacaaaggaacagtgttcggcgaccgcaagacgccggaggtggcgcccttctcgtcccgggggccgagcaggcagaaccaggggatcctcaagcccgacatcaccggccccggggtgaacatcatcgccggcgtgcccgtgacctcgggcctcgccacgccgcccaatccactggcggcgaagttcgacatcatgtcaggcacgtccatggcggcgccgcacctcagcgggatcgccgcgctgatcaagaaagcgcacccgaagtggtcaccggcggcgatcaagtcggccatgatgacaacggccgacacgttggaccgccggcggaggccgataaccgaccagaaaggcaacaatgccaatatgttcggcctcggcgccggcttcatcaacccgacgaaggccatgaacccgggcctcgtgtacgacctgacagcgcaggactacgtccctttcctttgcgggctcgggtacagcgaccacgaggtgagctccatcatccacccggcgccatcggtgtcctgcaagcagctgccggccgtcgagcagaaggacctcaactacccgtccatcaccgtcttcctcgaccgggagccctacgtggtgagcgtcagccgcgccgtgacgaacgtcgggccccgcggcaaggcggtgtacgcggcgaaggtggatatgccggcgacggtgttggtgacggtgacgccggacacgctcaggttcaagaaggtgaaccaggtgaggaagttcacggtcaccttcaggggcgcgaatggcggcccgatgaagggcggcgtcgccgaggggcagctcaggtgggtctcgccggaccacgtggtgcgcagcccgatcgtcgtctccgcccaaaagttcttgaacggtaacacgagctcctccgatcacgcgggccattgattgttgattacgtagctttgccagtaaatggggtacttgattagacccccaaggattataaactgccccctgatgattgtcctcgaaaaaagatgaagagaaagacaaaataactctattagaagatggaccaagatgcgaagggattgcgtggccggaaaaaaaaaaaagcaacatgggattctttttccatgatggccatggcctggatatgtgcccctgaaccaaactgcttcgatattgggcttgatgggtttgttacggatttagacctttatacaattagcatagctaaaatttcgatcttattgttgtgggttggatattggatgatagcactacggcactacctttgtggataagggatatatctcacacacaattcattcaaatttagacatttagtagtagataaaatggtgaaaaaaattacattaacggcacacaaattttgataagattttcttttgttcttttgaaaggtctccgcgggggtagatctccaatgaacacgcacattcacaaaatttgataataattttttagaagtcaaccaatacaatatactcgcacagagtcattgatgcaaatagaaaaaaaaaaacaaaaacaccaagaaactgctcgccaaggacgccgtgctgatagagaaaatttccacgcgtatgtacttaggaaagttcctttttattaagaaaataggataaaaactttgtctcgtatatattaataaaccataagtattcaaaaacatgttgtttagccatgaagtcaacttctggattggtcgattggtcacttcggctctaccgttgtggctccaccgttgtgtgcttcgctataggctctgttcggctgcacttaatttcattgttgtgcagccaacacaaacaatgtgttgtgtctgtagcagcagctgtatcggccagccaaacaatcccatagagcgtcaaaaaaccataccgaaacattctcagtgcgctaaattttttttcatgaaaaacagtctaaataatcattgtcgatgataaataataatcccttcaccgtttggactgaacaatatagttagtttcgctattggtgataatatgttatacacttctagcgtatttttagagcaatcatacaaatacactttctaaaaggaaaattgcggatctcggatagtatccatttcgattttggaatgcgttgaagctccaacgggtcacagggttttgacaaggagagagtcgacctttatttatttctttcatttattgccaatataacacgcgctttgcagcttgctcggcagtcctggtcaaagtcgcctcatatttaatttatctttcacaacgcttttgcagttttaatgtatttttactggcacaaacgtacaagcaaatatcaggttgcaaaattattttctattaaccaaatgggccagctgcaaacctacaagttgcaatagagtgtgttcgtttgaatcgtcaagtcctcgttttcttgcaaggttaggacgcgcaagactgtactacgcaggatgttggcctgctgccttgccctgtcgtgtcgtacagtacatagcatgttgcgaaactttctcttgaattgcccctacgcgttgttagtacattattattattttttcggtttgaaacatcggatgtatcgttattttgcttaggtcataaggtcattacaactgccaggttccagcagtcgaaaaatcgggtggcagacgacttttgtttgctaaaatacaacatattgaggatcagccgatcatgatgttttgctgcgattgcaagataatgatcgccggatgtttagctgcgattccaagataatgatggccgcttgcttgcacgttggcttctaatctaatgtaaagtacaggattaatcttcctgacgacgataatgtgcacgtcgcagcgttcattaacggaaaaatagcatgatatccaatgggtaaattgatccgtatataaatacgacggcatttgcaaaaccagaaaaacagttatacaagaaatacaattatactcaattctaaaataccttttaatccctttagtgtagtagcaaattcggcatgagacaaattcggttcctagtcatctatcatccaatgcaaattgccgcggtcccagcgaaacaagacctttttttaattttaaaaaaacagcgacccagagttgacttagctttaggcaccgtttattcttcgaattatctcatcgaactcatccctggttcttaaccgccgctaatgccaacatatctcctccctccccgctcgactcgactgtctccgtctcaccggcaatccggcggcaatggacggcgtcggcctcggcgtgcacaggcggtgggacacgtcggggagcgggtcgcagtacagcttcaggacgtcggtaagcagcgtcgcggagatatccaccgaggtgggggtggaagtgagcccgccgccgccgccgctggcggcggcggcggacaaggtgtttgtcgcagtcgccgcggacgtgaagtacggcaagagcgccttgcagtggacgctgcagaacctggccaaggatggcgccaaggtcgtgattgctcatgtccactgccccgcgcagatgatccccatgagtaagcctccagtcctcaatcatttgtttgatgatctgcgtcacaggagagagatttaagattggataccttttaatttcggtaatttagcgacgagtttggttatttggatcccgcttccgttttgaatctatggttagcagtttaataatggatatgattcgttgacattggcgacttgaaagccgaatgccagtgcaaactatgcatactccctttctggctttcttacagtacaatagacatttgcacgcccaaacgttgcttgacgaagtttctcatgagttgtatgattgtatctgccggcaatgctgacttcgtgcagatattctagaaaatacatacaattatttgttcatgtagcattattggtcctgtaactacttccaaaatcctattttgccgtcgcttcgtggaaaaaagtaacctagggtgtattgttaaaatgcaagaatttctatactaatttcaatatacctctacgtgggactattaccaaatcccaacaacactactacacatgcatcaaaggtcatcctcttattgcccagggtaacaagttcagaagcaatacgttaatatttgcaaacgatgcaactggttcacttctgatttctgacttctagtgcgatcagaaatcctccatgatttgtttgtcaccagtgcgatcagaaatcctccatgatttgtttgtcaccttttaaatagcttgtccttgattcctattgtttcagtgggggcaaaagttcattataccaagatgaatacaaaacaggtgaacgactataggaacaaggagagagaaaaggcagaggagaaactagatgaatatcttctgatatgcagaaaactgaaggtgttcttctcaaccactcttatgtctttcctaatgagcaatcaacaaagtaataaattacctaatacccaattatgcattctactaatattactcgagaagatatatcaatatatatctcaggaataatttgatcaatatttcgttttctcaggtcagctgtgagaaactaataattgaggaggacgacattgctaaaggccttacagatcttgttgcccttcatggcgtcaccaagcttgtcatgggagcagcagcagacaaacactactcaaggtgaccacaacctcataagttttttttttctgatgactagcacacacattgcacatttaaaactgtttcacaaaatattgtttcttccctgataagtactacctccgtttcaggttataagactttctagtattgtctacattcatatagatgttaatgaatctaggcacacatatatgtctagattcattaacatatatatatatatgaatgtatacaatgctagaaagtcttataatatgaaacggaggaagtagcattcagtgtttgccgctagcaagaattgagaaacagaaagtcccctcaaaaaaagaaatgagaaacagaatggtctgtaaagtctttaacagtttcgaacctggatgttttcccaatatgcaggaaaatgaacacacctaagtccaagacagcactcaagatattggaagcagcagatccttcatgtaagatatggtttacctgtaaaggacatctgatatgtacaaggtaaggttaagccaagcgggtcaaagcagtcttacgatagatggttttcagtgatactaacatcagaaaagcacattgaacaacacgtgaaaaatagctaagcttacccgtcaacattgcagggaagcaaatacaaccgttcctgcaataccaccatcacctgcacacacagttgcatcaacattgtcatcaagcagcatttccagccgtatgagatcaatgtcattgcacccgtcagagagtgaagcatcaagctcaagcggaagtccaaggcacaatctgaacagatcaagaacagaagtggcaaagtatccctcacaaggatctggcactgcaccatctcagttatttggacattcagatcaagatgtcaatgaccagccaacaagaacagcaatgggttctatagattcctgggatgaatttgagagatcgcaaaactcctgctacgattcatcaagaaatagtgatacagttagggtctctggatcagcaatgcagcagcccatgtatgaacctgatgatgaccattttgtatctcctcgtaaactggtacatatcgcctgatgtactgtgcaagttgaaaaacataagagtaggactcttctcaatgaaatgtaacacataactgaactttttgtgcaacacaggagaattcaggcgatgatgcagacatatatggtagactccaagaggctcttagtgaaactcaagacctgaagagagagacatacgaagaatcaacgaaacgtcggaacgccgaaagaaatctgatttcagctcttcaaaaggcaagtcattttgcttcaaaagtccataattcatactgtaaaataaaaagatagaacttatcttacaggtcaaagagttggagaacctgtatcagaaggaagtcatgcatcggaaaataaccgaagaggcactggagaaacagatacaggagacagaagaaacggaaaggcactgcaatgcattatatgacaagctgcatgatgtggaagaacagaagctcatggtggagcagcacataactgaaatggaggcagttttaaaagaacgcgaagataggctgcatgatgtagaagagcagaaattcacggtggagcagcgcataactgaaatgcaggcagttttaaaagaacacaaagataagctgcatgatgtagaagagcagaaactcatggtggagcaccgtataactgaaattcgttcagttttaaaagaacgcgaagagaagctcgcagagagcaagtatctactccaagtgctccaagcagataaagagaagctacaacaagagcgagatgccgcagtaagtgaatctcaagacttgcgcctgaagaacaaacagagaatttccatgccgggtgaagatctaaacaccgagttctcctcttatgagcttgaacaagcgaccagaggcttcgatcaagaactcaagatcggcgagggcggttttgggagcgtctacaaaggcacactccgcaacacaactgtggctatcaagctgctgcacccacatagcatgcaaggtcaatcagaattcgaccaggaggtaatccagttcatcagatcactcacataactccatcaaatcaagttggcaaccatggctaaccaagcaattgacaccattattgcagattgctgttctcagtagagtacgacatccaaacctcgtcactttgatcggctcttgcagggaggcatttggcttggtgtacgaattcctccccaaaggcagcctcgaggaccgcctggcctgcctgaacaacacgccgccattgacatggcaggtgcgcaccaggatcatctacgagatgtgctcggcgctgagcttcctccactcgaacaagccgcacccgattgtccacggcgacctgaagccggcgaacatcctcctcgacgccaacttcgtcagcaagctgggcgacttcggcatctgccggctcctgatacagacgaacaccggcgccgccgccgccgccaccacccggttgtaccggacgaccacaccgaaggggaccttcgcgtacatggacccggagttcctcaccaccggcgagctgacgccgcgctccgacgtgtactccctcggaatcatcatcctgcggctgctgaccgggaagcctccccagaagatcgccgaggttgtggaggacgccatcgagagcggcgggctgcactccatcctcgatccctccgcggggagctggccgttcgtgcaggccaaccagctcgcgcacctcggcctgcggtgcgccgagatgagccggaggcgccggccggatctcgcgaccgacgtgtggaaggtcgtcgagcccctcatgaaggccgcgtcgctgaccgccgggaggccgtcgttcgtggcccggccggacgactccccgccgccgtcctacttcgtctgcccgatctttcaggtagcaaaaaatccgtgattaaattattcctgaaaaaaatcgaggcaaaatttcctcgtgattggatgatggcttccatcggatgctctaatcagctgaagaaagagtcaaaattttcaaacttaattttaaaattaattttaagatattttaaacgtaattttttattgacttttaaattatcaagaatatatatatatatatatatataagtttacccaacaatttatttttattttctaaaaagccaaaggaatatgagtaaactatgggggatgattcaaactcgtgttgggatggatgtgaaagcaggaggagatgaacgatccccacatcgcggcggacgggttcacgtacgaagccgaggccatcaaggggtggctcgacagcggccacgacacgtcgccgatgacgaacctgacgctcgagcaccgcgagctcatcccgaacagggcgctccgctcggccatcctcgagtggcagcaacagcgtcaacggcatcagccgcaagaggaggacgacgactgtacatgagcaatctctcatcaatcatcactcaccgcagttgatatcctccatacctggcgcttcgcttcgtcctgactgtagatcctgcacatacattagcattagctttgcttgggttgaaatttgaagatccaagattgctcgagaaaaggggaagtttaccctgttcgtcttttgtgctcgttaatttgatttgcgatttccgctgtggagtacagacatttgcagttggtaatcctacccaattttacccatgttgaatctggttctgatccgtcttcccctgtatataagtgacgaacagcgaaaagagatgtgcacggaggcggcggcgggcggcctcccgtgatcgtgaggacgtgaggcctgatccatcccggtgcacagtggctggcccgtgaacagtggccttagtcactgagaaaagtttaatcccacaaaattcgtggcccatgaatgctaacgcatcggcccatccatgcctctgcttcgggaggtggcccaagcaaaacttttttatataggcccaagcagaactgttcgttgtacttgtgttgcgtgctcgcttcattgcttgacgctggtcttaaactataaactgcatcaacttgtcacgtccacgtcgaatgctcggtaatttccaagttactcagcttgggtccacgcggcaaacatcgtccctgcatacagtagtatacaatacatctccctttagcgacatacgcgcgtatgagctacgtttgcttgcttgatcacgccaacgcgagcgcaaatggcatctcgtcccaccgttgtgtaaagtcatagcgtcgactttggcttctggtcttcaaagaaaaaaacaactttgcgttattaactttgtgagtcaatgcatgaaatgaaaaatatattcggtgctgactacttctgctttcttctgtaacttgatctcgaaatttccattcatgaaacggctgggcagttactctgcagctgcatggtcttgtgcttctcatttctcaacgtcaggaagcagcaatggatagcgacggcgaagagtacgacgcgatgtggagcgctcggtgcagcgtcagctcgtcggccggctctctgcaggacgccggcgaccagtgggacgagcagagcctggccgccggcgaggacaaggtgttcgtggccgtcgacgaggacgtcgagcacggcaagagcacattcctttgggcgctgcagaacctgtccacggacggggccaatattgtagttgctcatgtccacagccctgcacaaactctcagtaaaggtaagcatcttgcttctcctgctttgacagctacaatcacctggtgcaattcagtttacatttctcgatggggacaaaagttcactgtaccagaatgaagcctgaagagatcagcgagtacctgatgttggcgaaggaagaggccgagaagaacctagatgaatatgctctgatagcgaaaagcacaggaaaagatatgaaggtaaaattgtctcattactttttttgttagtgcttgtgaaaaaaattacttgcatcaagtaacgtggggacgaaatgatgtttatcagtcaaaatataatcaatatgagcatgaacattaatcctactatttcagactgattgtcagaaagtactaattgacatggacgatgtcgcaaaaggactcgaggaacttattacccttcatggcatcaccaggcttgtcatgggagcagccgcagaccaacactactcagagtatggaccacatctgcctaatgtagcgtttttcctgtaatgttttcaagaaaattttactatttctcatcgcaaataaaaaaaaaggggagagagatagagagagaaatttattcctggaactggaggctctggtacttaagacggtgtatcggactatgtggataacttagtacttgaagctctgaagatttatcaggactaggctatcagcgtcagcaaattaatgaactaaaacttcagtcgtaaatttatttcattctacaccagcatcaggagtccaggactaatcaaactacataggtagcaggaatagatagaacattttatgagatgaatccatactaaatatatgtgcacaaaccttatgatattataacctgtagggaaatgaaagaaccaaattccaagatagccctcaagctgatggagactgcatccccatcatgcaagatatggtttacctgcaatggccatctgatatgcacaaggtaaagtcaagtgaatggtcatttgctacctgactttttgaacttcatagagcttagtgcatctcatgcataatagtacttcgtacagcatgcggagaattgtaggacacataatgctacatttgagtatctttacttctgtcaacgaattgaactaggataccagtgtattgcactcttaccaagaaaccaggaaaatgactaaaatccattagttgtgtgcacttacagggaacccaatgaaaaccttcttgcaatatatgtgccgcctgcacaaagcaacacggtaccattgtcaatgtgcagcatttcaagccaaatgagttcgatagagctgaagaaagaagcaccaagctcagaagaatatactttaagatcattggctcaatcggcaatgagtgattgggactacattttcgggggtgactaaactgactatcctaacatatttagaatttctaatttacacccttgcaaaaaaaaggttatattggattttcttgcttaaatgatttatgcatacagcatcaaattgttgttttacatgaattcaaggggccaaaaaatgatatgtagtttcaatagttctcccaaaatatagtttcaagaatccagaggtttcaataatttatagcttaaatttaatactctctgcagtcatgaatatttgatgttgaagacaatattcagtcaaacttataaaattccgaccatcgatagtttctcaaatggctagtttgaattctgaaaacaaaagaaatggtatgctagaattcgccttgagaagaactatcataatatcataaacttattagattttataaacttgttataatataaattaatggtcataattttagaagtttaaccgatcttgccctaaacgtcaaatattcatgaccagaggtactagtatgtttcttctttgcaagctatattcctgatctgtgatgaaattactgaagcttactactaggatttatacctcagaagtcataacttaaacagtaggacatgtagaagcagtgggtcaaaataatcgtttttagttatttagaacaaccgtgttaatcatatatctgcagaaagaaaaatgaactcctacatgaggagaacagatgatttgagccatgctgttggcatttctcttctaaacgtagtcatgctaatctctattttattcataataatgaactccagattggggaaggacagggtatggttcattaaggactgatgatgcaataagtattcctgaagccacaactctagctgcgattgttgacgatacaaacaaacaaagatcagtgatgcactctcctcaggaatctgacagtgtcaatttctcatcaccagcttgtgatcccgtaagactactaatgctaaatcattaagttaccaaagtaactagctgtaagtaaatctctcttaatgattggtggcatgcagcaacaagaagaagaagaaccaaatttagatgaagacatgcatgatatacttaatgaggcatgcactcgagctgaactactcaagaaagaagttgatggtgaatctagcaagcgtcgcaaagctgaaatggatctacttatagctcttcagagagtaagctttgttttattggctgactctgtagcttgtatatttgtagagaaaaataaataaagtaaccctcctttggccagcgtaccaaatgtgacatgcctccaaaatactgcttaaattaatttctctttttaggacaagtataactaaattagtcttacaggttcaagagtcagaaaaatcatatctacaggaggtgaaccagcggaaagaaactgagaggacacttgcaagacagaggctggagatcgatgaaatgaaaaggcgacacaatacattatatgatgaactacaggatacaaagaaacagaagcttctgctggagcaacatatatctgagattaaatctgctgcaaaagattatgtacaagagattactgaatattttatacaagaatcatgtgaggaagccaagaaattccaaaagatcaagatggatctgcttgcgatgcttcaaagagtaagcactttggttcaggactcaggagcttttaatttttccaaaaaaaaattgaccaattatctaaaaaatacgtgacgaaaatccaaactattattacaggttaaagatgtggagaatttaaaccgaaatgaaaagatgcagaggaaagatatggaggaaaagattgcaagacagaggatggagattgaagaaacaaaaaggcagcgagatgaattataccatgagttaaaagatgtaaaggaacagaagctctgtctggaacgacttgtaagtatggcagtatgactcagattcagcatattggtttaattcttgcagacgatcttactgaaaactttatataggattcatctaaagaaactaagaggagaagaaaagctgagagcgagatgctctccgctcttaagaaggtaagatactaagacgtttgtttcagtggtctgtactcagtactatgaattgcaggtttgtcatgaaaatgtggagtactcttacaggttcatgacctggagcatcagtatctgaatgagttgaaaaggcgggaagcggtggaggagacatttgcacggcaaaaagaggaaattcaagaaacgaaaagagagctaaacaagatacgtagcagacatatgacagagatcaaagctcatgaagaaaagcttgcagaaagcatccgctttatccaaaagattcaagcaaagtatgacaaaacactacatgagagagacactgccatagcagaatctgaaaaattgcgccaaatgaacagggatggagcttcaatgatagcaaccacccagatcgccgacttctctttttttgagctgcggcaagcaacccaagactttgatacggcactcaagattggcacaggcagatttatgaatgtgtacaaagggttcatacggaacacggctataactgtaatgttgcttcatcctcagggcctgcaagggcagttagaattccatcaagaggtaaatgagataactaaagttgaagctatatagccatacatttccctttcagcagaagagcactgaatcatcattttctgtatatgtggcgtcataactgcaggttgttgttctcagtagactgaggcatcctaacgtcatgatgctaataggtgcatgtccggaagcttttggcatggtgtatgaattcctcccaaatgggagcctcgaggaccagctctcgtgcaagaaaaacacaccaccactgacatggaagatgcgtaccaggatcattggggagatatgttcagccttgaccttcatccactcacagaagcctcacccggttgttcatggtaatctgaaccccatgaacattcttcttgatgccaactttgtaagcaagttgcacgtctgccagcttctcagaaaatacaacaccggaaataacacttcaggaacatcctcctacattgaccctgaattcttgtccaccggagaactcgccccacgctgcgacgtgtactccttcggcattatcatcctacatctactgacaggaaaatcaccacagaacatcacaacaatagtagaagatgctatggagaaaaggcagctgcattcaatcatggacacctccgcagggagctggcccttcgtgcaggccaaccagcttgcgcatctcggactgagatgcgccaatttgagtggaaggcaccggccagatctcacgggggaggtgtggggggtgatcaagcctctgctgaaggatgcttcccagaattttggatgcaaacaagcatttgaagctctatcagatgacacacaagcaccatcctactttatctgcccgatcttgcaggttggtaatttgcgaccacatgataaattgatgtgatataattgatgatttcacacaaaattgacggggttctaggtcgatgtattagtagtgctatactggtttatccaattgggagtatgtattcgaacttaccagaacttttgctccgatggatggtgaacaggaggtgatgactgatcctcacatcgcagcagacgggtacacgtacgaagccaatgccatcagaaactggctcgacggcggcaacgccaggtcgccgatgacgaacctgagtctcgaaaaccgcgagctcacgccgaacagagtgctccgctcggctatcctcgagtggcgacagcacaggagatgacatcaacctattcctcgatgcggactcagctcatctagatgcttcatctcacctgtaaaatatagtgggggatttctggtgttacctgaacatggcgtgtgcctgtgcagaagtgtgcctctaaaatctcaatcaccatctatcggcgtgcacctactctactatcttaggtcacaaaaggtggatgctcatgagcggaatcggatccttacctgtgcgcgcggacggcggaggggcggcgagtgctggcgccgcgccgggccggtggggtcgatgtgacggcaaccgacgcgcgctccggctcggattcagcgcgggcggcggcgaaggcaagcggcggattgcggcagcaacgtaggtcccctcaccggttgcgcccccgccgcctcgccgcgaagggcgatgctgccgcacgctgcgctcgcctacggccgccacgcgctaccgctctcaccggcagagtcgagccggaaaggcagctcggttggtgagtccggtgggctcgccaattctcatgggcctatcgccgctacgagataaagaaggaataagttcaccggaggtcttaacagcgagattttttatgtcccttaagtacaaaatgtttacccctaaactcaatgtttatggcagtatatatatatatatatatatatatatgagtggtttcgctgacgtggcatcttagttagaaaaaaaaattaaaaaagatacgtgggacccacttataagttgcacatctcttttctactcgttttctttccccttctcttctctattctctcttctctcttctcttcttcaggccgacagcaggcggagagccggcgggcaagcgtggacgcaggcggcgggcggagagccggcgggctgctgtcgccggagctgcatagccggctcctctccgaccaccgcgcacccttgctctccctcctccgccgccgggacgacgagctccggaccaagatcaagtaccacctcctcgcgctcggatggaccatcgcctccaagcccaacctccctggcctcacgcccaggctccgctacgtctccctcgccggaagcatgcatgcatgcatagcaatacacaaacatatatatatggtgctcaactaatggctaggtcctcgcatgtgcagcggctgcaacaacaagagcacggcgacggcgatggtgcctccgcctccggccacctccgccgcggcccagtgctcctgccgccgacgacgccctccccttctcttgcgtcaccggccggcgccgccggcagccgaacctcttgtgacccgtgggccgtggctccgcgcacgcccgccgctccgctgccgtgctcgcccgccgtcgcgctcgcccgcagcccggcggcgcttcgacggtgaagagaaaagtgaagaggagaagaagaaaagtgaacaggagaaaagagaagaaaatatgtgaagatgacatgtgggccccacgtacttttaaaaatttttttgctgactaggatgccacatcagcgaaaccacccacgtatactgccataggacctttagtgcacggtttgtataagtttagaggtatacatttctggtttatggttaagggacttaaaaaaaatcttgctgttaagttgagggatctccggtgaacttattccgataaagaaagcccatagacaccccaggcggtgtgggccccattaaaggctcaagctcaagatacacggcccagtatacaacggtgggcctcggccatgttccgcacgttggcccgtgaaatgcagatatactcggccctgatcaggttcagggcatcttctcaaaataagaaaatccatgaaataataagtatcatattttttttaagaacacggcaaagatctgcgtatcatttcattaagataaagaacaaaagatgtacggtgttagaaaaaaactccgacactcgcccaccaagaatacaacagaatactatcgacgtttgatgtctcgactacggtatttgcatggcatagggatcgttggtactaggatatacgcgagactgaggtaaaagagacggagacatcgatttttatacaggttcaggcccttgaattgtcatgtaataaccctacatcctgttggccgaagccggtcgttgcccttattcaccataatcacaccagtacaatatttagggtagcctatctaactgttgtcaacatggcagtctgaaggtctgactcgcagtcgacaacagggtagtcttcctcctcgaatccgtgctggcgagatcaaagatagcgctttcgtctctactgacagtgtccggagacaccataggggactagccgtgcctatctctgaagtcgatatccggcgttttgtcttggcgtatgttggcttgtatgttgatcttctgtcttgatctattattccgtagattgtggtgggtgttgattgtctgtgttcgtgtcccctctcctcctacgaggccttgtatttatacccataggtatccccttgtccaagtagaactagggaaacaaatatggatacaatccgagtagtcattgtcgtttccatgtagaactctggttgtctttccttatccggaactcctcctatatccgcaggttgtttccgtataggacatggtatgtggtgggtcctgccgagatttagtcaactactattaggtatgtggtatccataaccctgacaaataccacacacccaaagaaaaaaaaacacaaactagtgcattagcagcccagtcctagcaaagagatcatgaagcctagcagctcctgctaggcaccaaagagcgccctcattagcgatagctcggaggacatcggccaagcataggatagcaccattaaatacacaattgttcatgtgcttccgatcgaatttcccaagcgaccaagatgattaaagagtttagccctttcttctcattagtaggtaaaccccttactgttcttgaccctcaattggcaaacctagcaataacctgggtttgaaaagctagagtagccaagccgttgcacgaccaaacaccatacttatcaagaaaacacacaagtgactaggatgtgactaatagttttctgagctagatcacataatggacatgtaggcgggtgttgaagtcctcgcttgtccaaccggtctgttgtccaacaacgattattaattgccaaccatataaacaatctgtatttcaaaggcatccaactctttcaaattcttcttctaggtgcaaaccttaccgtcccaacaaagatggcctcatatgcagatttagaagtataaattcctgagtttgagagcttccaaacatgctgttctggaacaagtatcatattttaagacatactatcggtgaatataacttccaaaaaaacgtcatcttacgagtcaacgcgttgtagaaatgacatatattgctgttagagttatatccattttactccgttaacctcgtcacattttaacagtgagaaacggatggaacctaacggtaatggtatttttaggtaagttagcttgtacaatattttttggaagttgtgttgttggattttctcctaaaattcagcgggttactgtatcccttcgtcctgcagtccgcatggtcaagcggttgtactgcatggacgagctctagaggtgaacggacatgcacgagtacacaactcgagtcttctttacatcgtttttgcacatctcgcactcggtagcactgttctcgccgtacgcagaagcggcttcataccgctatttctactgtggtagcaggattcagaattcgcaaaattacataaggccacgaagggagacaggacaagacagcagggagacaacaatggcgttgtcgtcgtccccatgcacgaaggcggcaacctacacgctggcaaatcatgcaagatcacaggatacagaatcgccgaaggtaatagctttgggctgttccggccatacaactgaatggatgacagcattttggctggcagtgggccgtgcgccatggcgctgtccaagttctttaatcatgtggtgttattagcatctactcccggacagggtatatcgagttgtctttgcttggatggcttcttgtcttggataagcgcgagaaacctatcaaatttattctgccaggttgctttcatgaattattagtatttcggatggacctgattgatcttctctttctgtatgcatgccctgattaagctccaatttaaactctagctcgtttaagaaatccaaagtactctatggtttgtgttatgtggtaggcccatgctaatccaaatttatttccaaattccaaaccaatgatcttgcatctcccattatttgcctgttacatgtggtttggttttgctaagctggtacgtaacagaatgtcatttgcgtgcaaaagctgatgcttagtttatctatttctgttcatgtcaagaaaagccaataataatactccctccgtttaaaaatattatttgacaccgttgactttttagcacatatttgaccgttcgtcttattaaaaaaattataaaatatgtaaaactatatgtgtacatgaaagtatatttaacaatgattcaaatgatatgaaaagaataaataattacttaaattttttgaataagacgaatggtcaaacacgtactaaaaaatcaacggtgtcaaatattttaaaacggagggagtatgacctaacgaccaccggccctgaactatgagccaggcagtagttaggccctcactatattaaactaatatttgcggaagagaactgatcctcgtcgatagctttttatactttgctggaattgaatttcttattgattagttcatcctcgaagccaatcatttggcttcaatcatctggagcatatccacagacaccatcctaccagatactttaaattgaaaataaattcgcacggaaaaccctaaatcatccccataaattctgcaccacgcaaattaaaaaactgatctggaaaaaaaatcaaaaaactgttaagtcagtaaaccatcattcgcgtggctgacactggagcagttggctgtggcgctggcgccgcccagggggttaggcagctgcccggggcggcgcatgtgcgcgccacggacgtgtggcgtgcgcgccgtggccggcagggcgtgacgcgacgtgcacccgttcgagtggcgcacttgcgctcgccgcggtggtgacgctctcccggcactgcctgcctgcctgcctctcatcatgcggctggcacggtggcaatggacaaggtggtaacaaggtgaggggaaaaaaatgaattttgaaacttgattttaaattgttatggggtttttcatcgctttctttttaagcttgcttttaactgctaagagtgaaatataaaaattctatccttacaaatagcaattaaagatttaccactggattcacatgttataaactgttagcgataaattattgaatgccacatcttaaaattactaaaaagttaaatgctcccatgcactagttgcggctgatgaaagaaacaatgcaaagccagcgagatactgatgatacagtggtacggctctgcagctttgttccaacggcttctcgattttttcagcagcagaaacagttgtggcaacggtcatcactcatcggagctcagagtctgctccccccgccaataatacagtgatatgtgtacgtgttcgtcagttagtgcgagtacaattgcactgagaagaacaggagggaatagttctccttttcggtaggattattgaaggagatgggatgtattttatgcttgttttttcccatagccatctgaattccttgattctgtgggctgaacagctagactgtttcagcagtgaaatattggagaatgatctgttcttcggtggaaagattgaggtcgttcaaagctcgggaccgaaactgacatgcatgatagtggtatttttgtttctcaggatattcagagcatgcgaagtggctcatggaaaaacgttagttgcaaaatttcaagcacaagtgaattgatggtcttgtccctgctctttattttaggaaccttgttctttaattctgaagttgtacagttctgaatttctgatggctcatcctggactaattactgaaaattcaggtcatagaaattcagcaacgaaacatctgcaaaataattttggccacaatcatgccctgcttaggtgtaaaggacgaaagtttccatgcttagctgtagcatggggtctctgaattgctggaaactctgtgcaatagcaggcctctgaatatcaatcaagaacgtcacccaggctttttccgcaaacaaattcagtgcaacaactactgaaaaaacaagtactcctgtgcagctcgctttgcctcagaaactttactttctctcttcagatttttcagtacatgtagctgcactatacctgggccctttatcaccaggaacaccaaaacaatggcatcttttgactctccatggaagcgacaacatactacagtgtagcatcaaatgatatgggtcatcgagctaagtgtaacacattcaattaagtggtctgaagaaacttgaactccccaacaagttgcctatccttttttcattttgggtgaattgcactgcagtttttctatcattatgctttctggaaaagtttactgaatgatgaagccaaagtggttaggttcatgtttgcatcatcatccatccaaagcagtggcacagatctgtgctccattaagctgtgataaagcatcgacagtaacataactactgcaatgtaaactactccgatagtagtactcgtagtagttgttctctttctttaacacgcaactgtttaaagcaaagctgatcatatgcagcctgatgcaggaactgtatctgatcacgctaattcgacagtactagttaaaaaaggaggatttttacggtacattctactactagtatatactaccagtatatttaatttaacggtttaaaattcatccgatctcccttccaattatcctgcagtataaattgaaaagggtatatttgtctttttatctaattatgtgggggtaatttcgtgatttcacgtttcatcactggtcagatccgatccacggtcacccctttgtggaagtcgcgcccagtcgtcttcctcttgcgagcagcgagcgccgcctcgccgccgccgccattgggaatcgaatcgatttccctcctcctttcctcttcttgtgtcttttctggcgacccaaaaccctagttcttgagggaggcgatgggcaggcggagcagcagaagggtgcatgctgctgtggcataggcgcgcagcttccgcagctcgcagcggcaagggcagccatgcggcggcaggtcggatgcggggaagaataggctagggcttgagggagggcgccggggacgcgggagacgccaggcgcgtggaggttcggcttctcccggcgccggaggaatcgggatggaggcgtcggcgcgggagcaacgacgccggagcagcgacgcgagatgtatcgtgaagaagcggatgacgatatccacagaaaaaacaactgaaggaaattaatcccagtgaaaataattctctaatttaaatgaccaaaaagcccttttcagattttcacctaataccaaaactaccctttcatatactggtagtatatactagcagtagaatataccataaaagtccttaaaaaaaggtttctaaactcgaatcgaagagggttctaaactctaaaagaattagccgctaacatggatggactgtacatcacaaattctcacacacatgacacatatattataatcatatatgtgcccccatcactgtcctttcgacgttggctttggatcccggacaaaacagaaagaatccttcgaagtgagggaaaggattaggcatcctggctagtaggaggagtacaacagaagaagccatacttctagaattcagtattgcataatgcaattaggctgtgttcttggtggaagttaagaacctcacctctcgacacgaaaatggaacgatggactaacatacaattaattaagtattaataaaaaaatataaaaaaaaaggttaatatgatttttttaaaaaaagtaattttcaatagaaaatttttgcaaaacacacattgtttaaccgtctgggaagagtgtgcgaaaaaagaggaggagttaggctgcgttcggatctcggagatgggaactcattccctcctcacgaaaaacggagtggtccattagcgcgtgattaattaagtattagctaacttttttttaaaaaaaataacttttatatagaaaattttttaaaaaacacatcgtttagccgtttgaaaagcatgcgcatggaatactagtaagagcggttgggagtcctttgcaacgaaaacagccttagtagcaagcacaaactaactcagctttagaggcccctcatattgatgtttaacttgttatggggcatttatttctacacagtctcatttatcaactgaaactaaaaaggttgtccaattccgtcctccttttgtaacggctcgcaaatacaatgggttgtttagattcatgtcattttaaatcatattattttttataaagttatcaaaatgtacatatatttatttatttttaccaaactttactaaatgagataatccaacaaatggcatttaaagcgttcaaatccaagaaatgccatcgccgttatgcttccgtccgtttcacgccgttaaaatacaatgttcatcctataacacttaatggtgtggaatggacggaaccctaacggcgatggcatttttgggataaagtcgtttgtacgatggcatttcttagaactcatatttgtcgatggcattttttgaatttggatgattgtcaatggtattttttggattatctcttagtaaatacataaggaatcatgccaaaacttgacaatattgtcaacttatcaaaatttaattgggattattttggcgataatatgaacagcccttacatttctgaagaattatagctcaaatatggctatggccctgtttggattcggagggctatttaatagccctccggaatcttgctatttaagagtattaaacgtagattactgataaaactcattccataacccctacgctattctacgagacgaatctaacgaggtatattaatccatgatttgctacagtaatcagccgctaatcgtggattaatatacatcattagattcgtctcgtaaaataggctagggattatggaatcggttttatcggtaatctatgtttaatacttctaaatagcaagattccgaagggctatttaatagctcggagcatccaaacaaggcctatgtttagatccaaacttccaactttttctatcacattaaactgtcatacatacataacttttcagtcacatcgtaccaatttcaacccaaactttcaactttggaagaactaaacacagcatatgacagtgcagttcagctcaattttgttcggagcctaaaaaaaagaaaagaaaaaaagctcaatttggataaggctatgaataaactcaaaaaagcatccaacctaaccaccacactggcccaccagggcccacgctccactcccgtgatcatcacctccttccctttccagaaccaccttctccttccttcctcctcttcttcttcagtgtactctgcctttataacaccctactcctctctctcacctccaccatctagctcactcacacagtctccactcacacgcattgcagaggagaggcgacaatggaggggaaggaggaggacgtgcggctgggggcgaacaggtactcggagaggcagccgatagggacggcggcgcagggcgccggggacgacaaggactacaaggagccgccgccggcgccgctgttcgagccaggggagctcaagtcgtggtctttctaccgggccgggatcgccgagttcgtcgccaccttcctcttcctctacatcaccatcctcaccgtcatgggggtctccaagtcctcctccaagtgcgccaccgtcggcatccagggcatcgcctggtccttcggaggcatgatcttcgcgctcgtctactgcaccgccggcatctccggtcagttcactctcctttggcttcctcccccaccttcaagatctcaagtcttcaactttgtcatgattttgccttggtttgtcttgctagttgatacttacttgttacctgcactttgcttggctcagtagtttcttcatactagcatgctcactttagtaaagcatgaggtatagaatcatgtgtactactactgctccttccataagtagcaagactttgaggcatatggcattaacactgaataattgatgaaagacttttagttacctgcttttggggtgttagatcagtattagtaactggaaattcactaaatttgttgtccatgctcttgtagttttaaagaattattatagctttctacaggtgttgaatgcaccaaaaatttatgacactaccttttgctcttgtaccatcatgtaccttgtctgcgcaaagatttgtcgctggcatattgtactgctgtggtatgtgaattttgttcttatgcaaaggtttgatttacgactagaagattaaggatttaaggtcatccgattgatttaactcttaacccagcattttcttcggtagtgttctaactgttgatgctgaaaccacacaaattatcacacaaaaatatattatttttagttcatcaaaattgaatgtgcacttggagccttggaggcaaagaaatatgtgatgccaaaattttctccttggttaatcttcctaccagaatattaacaaaactatatgaacaagtaaatatcttgtgttgtcaacttatacagtctatcacaactcgcaatcttagaagttaatttctgtaccagttttatataatgcttcaaaatctcaaatactaccttgttaatctcaaaatatgaatacatgagggtacactatacagtcttacttcaactgtcatgacaactgaccacaaaacaactacggcaattaagggcactactaatatccattatattgtctgttactgcaacaggaggacacatcaacccagcagttacttttgggctgttcttggccaggaagctgtccctgacccgggccatcttctacatagtgatgcaatgcctaggggccatctgcggagctggagttgtgaagggcttccagcagggtctgtacatgggcaatggcggtggtgccaatgtagttgccagtggctacaccaagggtgacggtcttggtgctgagattgttggcaccttcatcctggtctacaccgtcttctcagccactgatgccaagaggaatgccagggactcacatgttcctgtaagtatccttctcctttttgcagtgtgatatgtgaaagttcagtagtagttagtgtggtctaatgagttatgcactgtgataactaattcatcaccaaaccctaaagtgataatgtgcaaatcactaagcagtattttggttagcacctttacatacctcactcatacagtatgcctttaacaatgaactggtgtgctcataacttgtaggtgtgcgccatttatggctagacttttaactagtttaatttatcatgtttgctcaagaaattgactgtatgcgtatagttactggaagtatatatgggttttttgtgtgttgcataacgtatttctgtcctttgttggtgaaaacagatccttgccccactgccaattggttttgcggtgttcctggtccacctggccaccatccccatcaccggtactggcatcaacccagccaggagccttggcgctgccatcatctacaacaaggaccatgcctggaatgaccatgtgagcaacctttcttctctttttacctactcgccgttctcagcaattggttcctcttacattatcagatattagtcagcacatcattgataatcgatacattttttgttggcaaattgaggtctaagctgataaacatgtcagtatatataatcaaatgttctcagcaattggttcctcttacattatcagatattagtcagcacattactgataatcgatacattttttgttggcaaattgaggtctaagctgataaacatgtcagtatatataatcaaatgttctgatactttttttggttatatttttctctttgtatgggtaggtctaagatgataaacatgtcactataaccaaatgtagcagcatgctcttgctaaagtttacttagtagcttaccagcttactagcctttgctcaagaaaagagtagaagacacgacaaagagtttttccttacaaattttggtatctaaattttgcagtggatcttctgggttggtcccttcgttggcgctgccctggctgccatctaccaccaggtgatcatcagggcgatcccattcaagagcaggtcttaagccccgcgccgccgctgcgcagccgacgacatgcaacgcaatcgtgatgtcctgtttcccgcgcgctactgctgcgcatctgtcgattccctctatctctagtccccaagatgtttttcctatctgaaccctgaacaactcaatcgtgtaatccagtactcagtcactgtatgtttttatgtgatggagatcttaattcttaagttatcatctctgttgctggaaatccggtttcctcttcgtgcatgaaccgcgcctttaatacacgtactagaataatcttggcaggcagcaatgctggtatgatcctacgaagcctgaactatgaatgtgaagggaagaacgaagcaaaagagaaaagagaacaaaaaggtagctctgtctagttcccgaccgagtaatgccatgaaagaacaaatgaaccctagtgagtgtactataccaggatgagtgatgagtccagccttgcatccatcaagggctagggcttagcgatcgatctgatgaggagcggcggtttgaatctgtatgaatgagttagtggtgggcctggcttatgtgcgtcaggacaacgataacgatgaagatgaggacgattgatggtggccgggcgcggtgtaaagaaggccggctggccgggtagtgcgatggggacccgctagccaccgggcgcacgctactactactacttgctacgtaccctacggcagcgcggcacatgggaggtttggtggggtgtttggtctcgccactagggacttggaggcgccgaggcaaaaggaagttgaaacttggaagcaaagcgtgtaaaaatataatggagcagtgtagactgtagagatagatagatgaagtactatactagatacctgggtcgcatttagccatttactacccttttgcatttcgccttcgtcatcctgcttcagggaaatttggcaccagggaatattgaggtttatttatcatcatctcatccctcaaaaatatatgctaaatggaaaattaaaatggaaccgttccaaatgatcctatgaggatgcaccacccatcccatggttcagacgatttcccacttaagagctcctttgaatcaaagaattttatataggagtctcatacgatttaaatcctataggaatattttctttgtcgctatttgattcaaaggattaagggtttctaaatccaataaaattcctatagaatggctcattgcatatagattttagaggaaatctagcaagagctagattttagaggaaatctagcaagagctccagcctcttcaaaaatttcatttaagtctatatctctcatccaattcttacattttcatgcaatccaatcaaacgaccattcctatgttacacgtgtgttttgcacttgcatttctataataatcctatgtttttcctattcctccgtttttttcattttcctattcctccattttttcactcctacgattcaaaaagggccctaagttcaagatgagcgcaaaaaggcaaaagctagtgtttggtttttaaaacatgtttaactcgaagcaatagttctttagaaagaaagaagtcgtacaggtgtgcagttattcaactcgtagaaaaatgaaaaagaaatagaaaaattaaatcacattggagctaggtgcaccatatgattgtttcatgttccacaaactaatcaagattcaagaagcaacaaacgcaaaagcaaaaagggaagaagcaacataatcatatagtcacgttgatttgattaacgatcagaatctctgtataatttccagagtaatagatacagtgaatggattacctgagtacagcaacaacgctttcactatgcaggctgcagctgactagttgcaaaagctcgcagcaaggggaagtactgagaaaaagaatgggtattgaatggttcaattgcctctacctttgcaaaatgtggacttctagttgagtttcctcctgtacaatggcctcgaaacccatagattgtccaaaggaaaacgaatgtagataccagagtatacaggtgaagaactactgttttgggtccttggctatctagaccctctgtaatatacaattgcatcaacgacgtgtaactggttaacacataacaggcatggtaatatggaagtcaacgcctgttcctggtgggggcatagctcacctgtccattcagaatgcactgtcagcaatagactatgactaagatagatatcttcactgtcccaaaaacgaaggaaaaaaagaggaagagttgaagattgaatggcgatatagagctctccaaagccaaggatatgtagttggcggtccccaaatgaccccagtaaataagcggattggattcacatatctaagtccatgtttcggaattttactacaacaaaggaatcaatgtttggcaagtaaatatagtaccacacaataatggtagcaagtcaaatttggcacctcaaagattctgttatttaaagataccaggcaaaaaactactgcacttgatgatagtacgacactcaatcactcattaagcccatgtactatatatatccagtgaaggtgtaaaagctgttaatgatgtagataacatagagcaattctttcaagtcttagagttagaataaaaggctattctttttctaaaaatgtataaatagaaatgcgagaatttgcagaaaactatgagaagggatgtacctttgttgagacggtcagcttctgaaataattaatgaaattattcgtgtactatgatacagtgccaggcttgcagtaaatagatgggcaaactggctcagcagctctcatcaagctccaactcaatgcctatccagcacacctttgggtgaaatcaatgaccatggttgcacccaaggtgtggtggaccagatctcaaatccagtggaggcttaagttttacccgatcctcaaagcccttctgtgaagcatgctcagaaggcagtggcttatcatgcaaattccacacgctcacatgtcccatccttccaaattgagggctcagaatgtcagcttcagggactgccctctcctgaaaacctagcgagggttgtttcactctaacaaaacgaccaaggaccggatctggaggctggtttggcaagggctcatcaagacatctcgatgtaattgtgaaaccctcattattgtaagctaggtgtcttgcatggttaaaaggaatagctccattaccaccagtcagaggagtggaagcacctgaagtagttcttgggctcgaaatcggagagggtgacattataccattttgatgttgtggagatcttgacctcagatgagggctcccacatggagaaacagggcaagatatatagcttcgtacatgaatatcactgcaagcaccgatgattagagtacatacatttccatgcagatatacattcactgaactgttttttttttaaaaaaaacgaggaactgtatttcttataggagtacaggactgagttatcgaaaataaatgacagcagggtacagaacaagggtaaaatgtgaaaaatattacaatagcattaaacactgcttgaattttacagtgggagcatgttgcagctcagatgaattaagcagggacatcaacaaaacataaaagcacatttgggcaattattcatacttgcatgttgaaaaaaggacattagtaagatttctagtagggttcacttagtgtcctcatatataaaaaattcatacaaaggtcatttattttgtattcatttgaatgtcattatttaggggtaactgccaaaataaaaggaggaggagatagttcagtaatgtgcagctaaaatttcctactttgaaatgttagctaatttacttttcgtcataccaaagcataaggattatgatatgagaggtttggttgcggttctaatttaattttttcagcagagatttataagttagctactgctcctctagaatatttagtacacacactccaaagcaatattcttatgaattagcaggtagattcaaatattgaatgattcacctgtgcacagaagaaaatttagcagctcttctctggtaaatggattgcccttccaaacccaaagaagacatatttctggcatgcccgaccacctgaaatgtcacaagagacaaagcgtaagaaaaatggaacaatcaattgtccatctgataaccaagaccttaatactctaagtaggccccagtaacatttatctgtcctagttagctacaacagccagaaagaagcaaatgaaaggaaacaaggtaaaaaataaagtaaatgatttgtagaattaatgcatacagctgctaactgggcaaacatgcatgacagatgtttagctaaaagacaacatgttccaggaaagcagttgataccttcagatctggtttgcaggatgtagtagacaactgtagcaatggatccgacagtgatttttcaagtggagatgcatttcgtataaatgaatgctgcaaaagatccactgctgttggacggctggatggattgcgctgcaggcactgtcttataaagtctctgccctcttctgagaggtgatctggtattggtggaagctccttactgtttcctatcttaaacactgcagcaatctaaaaaacaaagcattgtgtcaacatctggctcataacagatcaatgatttattcctactgccaatccatacaaaatatttaaaaggaacaaaaaagagaggggggggcacttttagaacgaatgttactgcggaacaagagacatgtcaagaatataggaaagaggtgtcgcagattgttaagtagtatttctcataagggcaccttcaacgtgaagcttagatggatgctttggggaaaaaaataggatagcaaaataacatgatgtaaaatccaaaaatagaatggaattaacactaaaaactgctagatctaggtcaatatagtgataatcagtatgcattataataaataaaagattccagttttgacgccaaagggatccattgccccccttagcgaatacatcatgatgcaatgtctcaaaaagtccaagataaatagaaggtgaagaacatataaagaagtctaacatgcaaaacctcaaccaaattttcaatatacaaaaaatatataagcattcacatggtaccggtcatcatgtggttcctgtaccacttgtctgttttatattcaacataaaaaaatgaatacaaaattaaatcattgcatctttaaacaacctttttgttttggaatttttcaaacatagtgtcatgttggattcgtcagatttcatcaaaggggatgctgggcctcctggccaccacaaacttttgctaactaaaaagagcattgggaaaataagacaaaacaatgagccatgctgaacttgtttttttaattaaaataagtactgaagcaaaaccacaacaatgatacagtatccaccattcatcttctatagtactcccttcagccaaaactatatgacatttgacttttttatggtcttcaaaattcactgttgaatcaaatattgtagcaatgtgcagttattcaaaactcgtagcaaagtgccattattcaaaattcaacgttgaatcaaatatggttttacattagaataagtataaaatcttgtaagtttatgatattatgataatacttttcaagtcgaatcgacacataccatttttaagttgaactaagcccattagaagttatgatggtcaaggtttcaaaagtatgaccgtatattgtcctaaacgttcccctaaaaagatagtccgaaacatcaaatatttatgaccaaagggagtaccttctcatgaaaagaaaatgtgtgttgcacaaaaacataaaatacagcttaagagcctagtataagtactaaccccttcatattggctccatggtggttttgaggtagccatctctaaaaccgtgcatcctaagctccatatgtcaacagcaagattacatccattagaattttttataacctgcatagttattacatgtgtgagagaagcaaggttgatttttataacagcggagagaagataggcataaattcatcaaataactagagaagtgtagaagaatgtaggattttcattacctcaggagccatccagtacgggctacccttaaatgaaaaggcacactgctgcccattgatctgaaaaatggattggcagaaaagaagttcatatgcgcggataaatatccaaagaagaaacatctatagacaaaaggaccttcccataaacatataacttgctagaaacaactaatcacttatccaaatggcccataagagtcggcccatgaaggtatacaagcttatattactaataaaatggcactacatctatggtaaacaaactactgcctagtaactagcatagaaacatgcataaccatttggtccaagtaagccagcaaatgtgctgacagatacggtaaggaccaaaacaaaatggttatctcttattgaatggattgatctagcacaagtggtagtcctcaagtgcaagagaacacgagggaaagggtaaagcacaatacaccatttcttcctatgaagatgatacaaggaattacatctaataatgcttttgctttaaattttagttattcctgacaaatgagaaagatttttttttttacaatttgaaacagagaatttacatgttttgccattccgaagtcagcaagctttacacgaccattaggatctaccagtatgtttgcacctttaatgtccctgcaaattatggaacatgacaaataataaaataatctacaacttggtagcttacatctaaggaactgaagtgctgaactaacgacaaaaggaaatggaatgttacctgtgaaccgtattttttgcatgcagataagccaagcctaaaagtatttgcttggtataactgcggatagcaggttcaccaaattgcccatactcctggagtagtttatggatggatccaccagaaacatactccaggtatatataaagtttatcatcaacctgttttgaataaatggatagtgtatagttatttttaaagtaaacagaggagtcaggagtgcaagcaaaagtgaagttcgtaaaattctgcagaatgtggcatgaacttttttgctacgtttccttacagagaagtgttcagagaaatattatagttcagtggcatatgtcatcatcagagagtacagtgcagtgcaagaaataataatgcgggtacgcacattggtcatgcagtcaaaccttgaaactaacccacaaatctgtactccttctgaaggaagacagtgtagcggtggtgacagtgaatctgccacccaccaactatgaactacattttgtaccaataagacatgcatttatttttatctgttgcaaagccacctgcatttagctagtaccccccccccaactgtttcaaaatataaggcttattttgagggcacaaagattaagaattgttagaataggtgtcgaatatactagtcctatttggttacggttggacttggagttgtaataggtgttaggggtagagttagagtcggactctgtaacctgtcatctctcttaaatagagagggggcaccacaatgtaatcatggcgactacaatgtagcgtagacacgcagggagatgatggcggcatggccatggactcgtagcggctaggagctatattggttggggaggagcgcccataatcagagccccggggatgtaggcttcggctgaacctcgttaacaaatatcgtgtgttcctgtgtcgtcatctggcatgtcttgggtgattaatgattgaagcgatcgagaaggttagtcgtcgttccgctatatcggctaacttttataacaagtggtatcagagcagaaggtttcaacattggatcaagaagacatgtggaggaggaaacacgaggtgggggtcgcgcatcgacaggagatcgtcagccgtggcgatgagatcgatggcgacaacgaggacgttgcggaggtgacaacctcgctcgcgatcagaccggcgatggcggaacttgaccggaagacggggccgagcgtggccgaaggcgaccggagagatcggaggggtagcgccatggacggcgcgcccgacgcacgcggcgaacgcggcagggaggccagtgacggaagggcgaagccggcgagcgtggcacggcgcggcggacgtgcaaggccgatgacgacgggatcgtggacggaaaacatgagggctgcgactgcggtgcgtgcagaggcacgaacgacacgtatgtgtacgtgtcacatgcatacagtacgcgtacagatggtggccaagagcaagagatatgcacgagttgttgcaagcatgcaggatattaattccatgcatggattaattagttgcatcttaatgcatgagtgcatacgatttcaattggatttgtgtgggacacgtacaagctgcgtgcatgcatgggcatgcagaacagacgacgtggattgctgccgtgagagaagatgtgaggagaagtcaaacatcaaaggcctaattccgtgtgggagctggtcaggagaccgtttctgataaggcacgaaattatgtcatcgacgcggactcggcttgacgtgtccatccggactcgaagtcgatctggactcggtatcccggtggctgatgctatttaaggagcggtcaggacgtgaacctatggcagaaaaggcgacgggcaattgatcgagacactcgtaagcttaccacggaaggcacaaatctgggctcaaggcaagatcgtacagcaggcgtacaggtgtgtgcaaaccggacagaaccaaaagcaggacggagaaaaaccgtgaagcagattagttggatcggtgcggcggcggacaggtggtttgctgttgaatgtctgagatcggatcacaagacgggattgtgaagacgaatacggacggttctgagaagggcgagtattctggtggcgacagaccagtcaggtcgcgggttggcaagatggcgccgacaggtatgaaatttgatttggtgaagtttgacggctctggaaattttggcttgtggcaaactagggtcaaagatttgttagctcaacaaggtgcttcaaaggctttgaagggtgtcaaaccggccaagatggaggatgacgattgggaggagatgcagttgcaggtggctgcgacaataaggctatgtctttcagatcaggtcatgtaccatgtgatggaggagacctcaccaaagataatttgggaaaagttggaagctcagtttatgtccaagactctgacaataaactgtatctgaagcagaagttgtatgggctaaagatgcaggaaggggtggatctgacagcacatgtgaacgttttcaatcaactagtcacagatcttgtgaagatggatgtggaagttgacgatgaagacaaggccatagttcttttgtgttcgttacctgaatcgtatgagcatgtggtgactactttgacgtacggcaaggagaccatcaaaactaaagatcacttctgcgttgttggctcgtgatcagatgagaaagaacaaagagggtgaaacatctcaagcggagggtttgctagtcaaagaagatcatgctgggcataaggtaaagaagaacaaaaagaagaaggtggtgcagtgcttcagatgtgatgagtgggggcatataagcaagaagtgcccaatactgaagggaaaagctaaggctaatgcagcgacttcttcaaatgactcagatagcgatggttgtgatcttctcaaaatgtcaagtgcacagtctaaggatgcagaagcgtggatattagattcagctagctcgtttcacgtgacgccaaggaaggagtggttcttttcatacaagtctagtgagtttggttttgtctacttaggcgatgacacaagttatccagccgtgggagtaggtgaagtcaaaatcaagctagaagatggaggtgaacatgttcttcagggtgtcaggcatgtaccagggctaaagaggaatctgatttcgcttggaaccttgcatgaagaagggttaatatttcgcggtaatcggaataagaagaccatggagatcatgaagggcaagacgactgtgatgactggagagaaggtggagtcgcaactttacaagctgcgagggtgcactattgcaggtggagtccaggaggaagcggttgctgggatagcaattgcttttggtggcggcgggtctggcgcagactcgtcgggcggcttgcggtgaagctgcgaagaagacaacccaagtctagaggataggtggatcggcatggtgattctactacttctaggtggcttatattcgccaaggtggagtttgttagaataggtgtcgaatatactagtcctatttggttacagttggacttggagttgtaataggtgttaggggtagagttagagtcggactctgtaacctgtcatctctcttaaatagagaggggggcacgacaatgtaatcatggcgactacaatgtagcgtagacacgcagggagatgatggcggcttggccatggactcgtagcggctaggagctatattggttggggaggagcacccataatcagagccccggggatgtaggcttcggctgaacctcgttaacaaatatcgtgtgttcctgagtcgtcatctgacatgtcttgggtgatcaatgattgaagcgatcgagaaggttagtcgtcgttactctatatcagctaacttttataacaataattgtacagaaccaagagaaagagcagttaaattgaccatcctaccatacttaaataccttagaaatagctaaatagatggttagtgagatgcttcttataaatgcaggagagacactagtaataattatggacatataaggaatatagttaataaatttgcatggagcccatatatcttgcaaaagtttgaaaaactatacgcctaacagaaacaaacgatggagtgtatgcaaaaaaaaaaaagatctgatatgtgaaaatggtactagtagatttgttatggaaaataccttcacgtagttagattttaatttttttttataaatgtattgttagaaaaggatttttttttatgaatgtgttgttagaaaaggaatgatcacacatgttcaacaagtaaaaaaagaacaggagtggtattaacagaagataacaactggtggcataaatttataccatttcagatccatagtatcgtacaatatttggatgttgcagacgattcagaagtaatatttcctggtaaataaagaataatataagagcagagaagatagcgtaaagaaaaggacagtaaacgtggagaaaaatgtcatacctgacacaactgctttgcactttcttttgatttaggatcgtctgagaaaagggtgacctccttcattgcacacatttcacctttatcactgatacaaatgacagagaattatattatatcaaatttgaagagaaacaaaggatgatcagtcctaataaaatagtcagtggcacactactcaaaggatatatagagtgcttgttacaaacaacattgtgacaagaccacttcaataattacactctcaaagaataatgatgtcttaggctttgaaggtgaaatatttctgaatgagactctgtttaaaacatgccagtttactaatcactaaaccatgatatttattacgattcaggatgtagtatgagaaataagtatatgggagagattacaagagctgaatgagttagtaccattgtaggatttattaatgatgaaaaccatattgtgctttgcatcgaaattaaaaatgaacatcaaccaattccgagcatcgaaagggcatacctgttaaagccaatgtatacatggccaaatgtcccacggccgacaagctttcccttcttccaccgtgatccaggactagttggattttctactctaccaggactatgtgagataggactagttggggtggaattgtttggcaaaaaggtggaattgttacatatgcttagtggtggaaggggcaatctgtgggtttgcttcctcttcccttcatcaagtcgccttgttggagattcaggtgccatcccaccagcccttggatgcaatggagagacacttccactatgtacccttgaacttggaccagggcttgtcattcttgggctgggaattggtgaacactctggactacctcggctaggttgccaaaagagctgggctagcatatcacctcccactgaattatgcccagatgtttgccctgaaccaggactggagcactgagcagacccaacaaaagttacatctgtatgaggcttaactgcccaaaatgctgaacttggaatctgatcagggcataatattcttgggcttcgagaagggcttgacatcacactattgggagcactgtccagaacaacctttcgtgaattttgtaaatttgactggtaactgtcagcaacaacagtacctctgggacttgtagatagaatttgattactcaagaaagcattggttggcatcgtcacttccttagtgccctttctggtgatggcactagaacactccttatgcacaacacttcacaaacagagcaatcaatatccataagaatattttttaaaaaaagtacacaaacaaaaatgtgtttggataaatcatggattaagaaggataccttgaattaccggttgtagcaactttagccacattgtcggtgtcatttgccacaggtccctgaagtcgcaaatctccaggatcatcgctatctatagaaccatggctggagatagaagcagttgataattctgcaacaggttcggtagtttcaggtctttctttaacccaatttgtggtagggagcggtagttgttgtcctttgccacgcttttccaaaacgacctttgattcggtaatatcagaagcagtacgtgccaccatagcacgggatctaggaaggggaagtggttgtgcatgtgctctggctgcagcaaagctttgacaacgagaaacctcttttgaaggggatgcagagcgtgattgggcagtagaccagcaacctttctcagcagttggatctttactatgtctacgattcccccgtgattttgttctccccttttgctcatttggacttaataaccgatgaaatgtgtcaatgaggttttctttggcagtcttctttacttcttttgatgaagacttcccccaccatggtggcatattgaatatgaaacaagttggacaggatttcactgagctaatcacacattgaaattttgaaatcacgcaggtatccttagtttctgtagtgacaaaaaaaagtcctcaactcactggaatgctgtattatggagattcccagttagtgcttgctcatgctactttgatttctgtttaatgccttcaccacaaaggctgaaagttaacaaataacaataatgaggaccaagtcactaacagcgtgcatcattacagttccacacaactgcaaaagagttgagtttaatggagaagtacatgaccattgagagtataaaggcaaactgtgtgctgtttgttaaatttaattaaatttaataatacctggaagttggaggtagaagtagcaattactagaacgcttacctttggggttcatcttaaaaccacaatgaacaaaatcacatgtcaagctttcaagcttgctacatcactatcacctactgtgagcaaataactacagtgccacccattgctctaaaatgaaatgccaaggagataaagtacttattctgtcactaattgccccgtgcatcatttaagtcagagataactcctataccactgaaagtttcacctatctctgttttgccgattgccactaaataggctgtctctgccatcacaaaacatttgtcaacctttcatgccatttctgtccaagtgttatcagcctcctgtcgagctagcagcaatatggcataattgcgctcttctacctcctccttaatcccaccagtgcctccaacctccggcaaattcccttcttaacaagcagagtggcatgtaccgatgtgatggctacactctccaagtcggtgatcctactatactcggagccgaaccagttctagctaactgatcccggtaccaaactgtcacagccccttggctccatacctacatttctccgcgaaaccaacaaccaaagcacagttctacactccagggggcggatctaacgtgggatatcggggttgagctgaacccccacaaatttgttaggacacaaaactgttattagtaccgcaccacgaacgcaacaaacaaatcaaatcgggacgaggtgggacggctaggtgacagggaaacaaatcaatcaagtccgaatcgactcccaatcttacccacaccagcacatggaagaggaagagagaggagggctacgaaactagaaggaataccttcaattcgatacttcgattcgaaccgagatgctcgccggccggccgcacaggggagaatactagtgcggtagggggtcggggaaggggagcagcagcccgtccgcactgcgcctccggccctgctcgccggccgcgcgcgcgacggaggcgagtcggtgtcgcggaggaggagaacgctggccgagcctccgcccgtgcgtccgccggaaacggtttttttttttcagacgaacagataagatgagcagaggagaggaacggagagagacggtggagaggaaaatcgtcaggcgaaatgcgactaaattgtgcacaggcgcaccattgcctcctccagcactctttccagaaaaaaaaaaaaacaaaaacaaaaacgttcggggaaacgagttcgtccgtgacaccccgacgaaccgacactctgcgtggagacggtgtggcccgctgctctgtccatatacatgcaccagcggagtaactgcgatgtgctagcaccagcgcgatagatgagacgtgtatggttgctgccccgaaatgctcaagttgcatcagcaaaactgattgttgaacggaattggccatgccctcgtgtttcctgcgcccgtttcgcacaagaaaacagccactggtattggtgtgtgtcgagaatttcgtttacaagtatcccgtattcacgactgattagttgtttgcttgactcggttagtttggttaggtaaggtgcttgcaggatgtactacatggaagaggactctgactgtgaactggaggctggaccgctggatctgacctcattgctgcaacgcaagactgttattgtctcaggacatctaggtgaaactgacacgcctgcagtgtggtatacttctttttttttttaatgagatgtcaaagtccacgaaaaagccatatatccttgccgaaaagaaggtaggcgtggttagattatgtagttgcatcaaccaaaaccaaacgtgacagccaacatgtagtctaaaccagttgccccaacatcatcatcaatcgttttctcagatcctctcttcagaaggcaacacgagcaactgaacacaaacacatatcgctgtcgcctattgcacattaacccctgtgacaagtgcatgctctctgcacatcgtcgttacgcgcctgaaattctccgcagtccgatccctcactggatctaattgcgcaacagaacgctatcaaggcgacgatgcgcacggacgaaaacggcatcatgccaacctcagagtttctgcttttcgcaatggaaatctagcaaaacgattgtgccttacatgcggaaaactgaggaacttctcgtgaagaagtaggcaaccttaagtacacgtttactactacttatagatctatttgacaaattaattagcaagtcgctaatagaatcacatagtgatagatcgaggcttggaaaagaagaaaatgtctcttaagaatagaataaaataaatataatagttggctggtcaccaacacaaactaactcgaacaaatactatcaaagtactctgcatcttagctacatcacaaattattgctctttctttagttctcttttttgcttctccgcttctgctctctcagatccaaatccaagtagatctcgtctttgcaaaaaaaaaaaaatccaagtttctctgatccggatggtaaattcagagaagaagcggcttaaatgttcccaccaaacccatttaatttacttactgtctcgtactctctctttatctacacattgaatgttccatgcctccatcagcacgaatcttggcgcgagcggggccctcggatcttctacgcgcatggtgcggtggccctcacgtccgcgccgcggagctcgtcggcgacgggcgcgaggtcgcgtggacgtacctccattcggagcccgttcttcatgaagagcgtgagggacatcttctgctcgactcggtgtccctgcgcgacggcgaggcggtggcggaggagcacgctcccggcgatgttcttcatctgcaggtaggcgaggtccttgccgaggcaaatcctcggcccggcgttgaacgcgacgaacttgtacgagtcgtgcggctcgaacttggagccgtcggccgacagccaccgctccggcctgaactcgaggcagtcctccccccacaccgtcttcatgcgccccgccgagtatatggagtacgtgaccgacgagccggccggcacgaacgtgccgtccgggaggtagtcgtcggcgacgacgtgcttggagtcctctgggacggaggggtacaagcggagtgtctccgagagcgccgccttgaggtagaccagactgtcgagctcctcgaaggtgaagggcgccgccagccacaatgccgggtcatgggcgccccgggacgccgcgagcacggcgcagagctcgtgcacgaccttgcgctccacggcggggtgggtggacacgagccagaagaaccaggagagcgccacggaggatgtgtcgcggcccgcgaggatgaagttgagcgccacgtgctgcagcgactcgtccgagtaggagcccttccgcatgaaccgggacagcaggtcgtcatgcatcgccacggtgtcgcacttgccgttgcccgcgagctcgagcttgcgcgccttgatgacggcggcgaggtactggtcgacgtgcgcgacgctgctggccagcgtggtctccatgccgaggcccagccacttcttgcagcgccacaggtactccgggaagatgaaccggttgagcgtggcctcggtcgcgcggtcgaacgcggaggcgaaggcgttctccggcaagcccttggcgagcgtctcggggtccttgccgaacgccaggccgcagatgttgtcgaaggtgaggcggaggaggaggtcctgcaggtcgacgtgcgccttgccggcggccgcgtcgtccaggatgggcagcagccggtggtggatggaccgcgagacccacctggacattgccgtccgcagcgtgcgcgtggtgaactcgagcgccgccgtcttccgctgcgcgacccacgtctcgccgtcggagttgaagatgccgtcgccgagcaggtcgcggaagacggcgtgccagaaggggcccttggggtagttgtcgaaccgcgacttgaggacgtgctccaggttgcgcgggtcgcaggtgacggtgaccagcccgccgcggcgcgccaccccgggcaccgcgaagatgcacgtctggtacgtgccgccggcgcggcgcaggttggcggcgatccactcgtgcatgttctcggcgtgctgcaccagcccaggcaggctgccgaccaccggccacacacgcggcccgctcagcccccgggacatccgccagaaccacgtcatgtacgccgccgccaccgccaccaccaccgcccacgtccccacctccattttcctctggcaacaaactctgtaatgtacgtacagctgctagctagggctgtatggatccgatgagaatgcccggtgatggctagctacactgcgctaagtgactccacatggagcaagcaatgaggatggcagagtgcagcagggagagaccgaggtttttatagaactggtcggagcacagtcgagatggatgccaatttattgcaggtcgcgcaccggtcctgctacgctgctactcctagctgctaccaccaagcgcgagctctctctctctctctctctctctctctctctctctctctctctctctctctctgcatgtaccagtgtacatgaacgatgcagcagcaggacgcaagtcacgcaacaactccgatcctacgtacacacatgcatgtacgctacactcgcatatactaaggccgtgcttagttgtcttggcaaaaaaaaaaattgacgcataccaatacacatttaaaatattaaatgtaaaccaataacaaaacaaattacagattccgcctgtaaactacgagacaaatttattaagtctaattaatccgtcattagtaaatgtttactgtagcactacattgtcaaatcatggtgtaattaggattaaaagattcgtctcgcaatttacatgcaaactgtgtaattggttttttcatctatatttaatgctctatgcatgtgtctaaatatttgatgtgatggaaaagttgaaagtttgaagggaacactacctacgacgaggacttctgcatcgatccattgatcaggatcagagtttgtggtgccttgcgagtggtgagtcgatccattgatcaccatagtttgtggtgccttgtgattggtgaccggttcggtcgctcggccgcgaggagcacggagccggtcgaccataaattggcgcctgcgcgggccgttgggcgtccgaccgatcgatggatggatcagtggccaatgaggcaatgatcacttgatcagccgcggtgatcgacgggcacctaaccgcggggcgagccattgaatgcacggccgcattgaagggtggccatggggatggtggtggcggaggcgcagacgcttaaatggggatccatctgcacgcagtacacatatgcgtggctagctagctagatagacggagtgcaactgcaatgcaatgcagtgcagttcaatgcagatgcaaatgcaagtgtaaagtgactccagcttagctagatctaccggcagatcaactcgaagacttcaattgtgtgccgcagcgcgcatgtaatgtgatacggctactactactccgtagggcgtaggctaacgaaaacctcttgctagcatgcatgtgatgttgctgaccggcgtgtgtacgagtggtaggactctgaatctgagagcataaatagatgctacgcgcctacgctagccatggaggaggaccggagattggagacagtctcggaggggattggtcgccggtcgccggttgggttcgcggcttggcgcgacggtcacttggaccgttgggtagccaactctgcccactgcccacgcagaaccgcaaacaaacagaaacagacatgagttcgggagaaaaaaggaaattaagctcctggcaagattcgtatacgtgcacacatccgccacagatgctaatcagtccgcacggcagcgtccgtatgtacgtagtatacgcgtctgtatttatataaactttatacgtatgcacatagatattgtacgtacacgtataaagtttgtatgcatatatgtatagagtttgtatatatgtataaattttttgtatgtgtccgtatatacgtatatattatttgtgtgtatatattacctctgtgtacatatacgtatacatgtatattttatatgtataagtataaatttttatgtatgtgtacatataacttttttagatgtatataaaaaattttatatacatatgtatatgctttacatacatatgtataaaatttatatatgtatgtaaagtatatacatacgtactccccttctgtttctaaatatttgacaccgttgactttttagcatatgtttgaccgttcgtcttattaaaaaaaattatgaaatatgtaaaactatatgtatacatgaaaatatatttaacaatgaatcaaataataaaaaaaattaataattacttaatttttttaataagacgaatggtcaaacatgtttaaaaaaatcaacaacatcaaatatttttttagaaggaaatatcaaatatttagaaacggagagagtacatactaaggagactagaggaggggatcaccggtcacgagggcgtgccccagtgcgaccagtcgcccattaacaacgtcgaatatctacggtccgcaatggtattacttagttgtcacgtataaacttaccaagattaattgcatatgcttttttaaacaagtactttcatgattacactgccaaccgagccgcgcaagtttctcgtataaattaccttccagggagcatatatgtgttacattataattatattaaagttacaatataattatattataagttatatttcaaagattgtattgaggttttcattgaaagttgtataggtagtcaccactgtattactatctagtacttcctccctccgattacaaaattctttgacatttgaataatgttaggattaaacttttataatttcgactaatcaataaatttaaaaatatttagttaaaatcactagaacaacatatataattttgtcttttaaaatactataataatattatataatagaaaaatatagtctagatatattttgaatatcacgttattatcgttaagaattatgtatccagacgaagtatatcttttaacgataaggttgccctttgtcaatctatctagtcattaggctgctcaggcaagcaaaggactgctttatattattaagatcgatcactttcggctagtttaggggtagacttttttagcttatttgacggccggagccgtgcttattaatagctaccgggatgtttggtgaggctaactcgaatgaaacgctcgcattgtgattgtgtggtgctatggatcacctaccaggcgagcgccgtcgaagccgtgtcaagtgtgcatgcaacaagtaccatccagtatgatcgaagcatatcagcaattcagcatctctgtcaaatcgcacgcgatctctctctctctctgattgtgaggagggaagggagtttattagtactactaacaaacttggactctccatttcctgtgggcaataattaaagagactattattatctggtcgaggtgcttctatgctcacagttgctcacccacctagcacggttttaaaagcacggcactacactaccctttcaagcgtcaaccctttatgacagaccatcggcatcacccggtgctaacacgatatgcagcattttatatcttgtcacctgccgatcgaccatggaaggtggctgctcaagccgctggtgggtgtgcgcccaccccaagatgtttttcctgtgaacttgccagcattcccgtctcaaaataattaataatgataatcattatgatggtgaagaagaagatgaatgaaaaaattatcaacggtttggaatccaactacgatcaatttctatatagggatccgacccatgtaacggtacgcaatactctcagggtttaaaattcttgatattatcagtccgaaggagtattatatggagtatggtcatttgctcaagttagtctataacttgatgtatcctaatggtttgtgttcaccaccgaattccgtgtgttgggtttgaattctggcattgctcccttttttgggtttgaatcttggcgccaatccatttttttctcgccgtccaccgtgcgagcgagaaaaaaaaggcaagtgcacaagctaagttcaaggtgctaagttcgaaccccttgaaaccaaaggattatctggtcaccttgaggtgcgggagtgaggtgataagttcgaacccttgcaagtacacaggctttctcacgcagatttttcccctccacataccagcacgaatctcaaggcaaatccgacggccaaaaaatcgaaattttttctccttgttttctgttaacagaaatctagcaaatccgatagagaattctcactgattatctgtaagtgtgcaggatatctcatatttattaccgataatttctaacagactaaaatgtttgagaaatgataagacaaacagaagcataatatttgattcccagaaaatgaaagcagacttgtaatttatagaaaaatagttgaaaataattttcctaaaggagctttgccttccaaatttaataagaaattacttgaggtgccggatgtggagctcgcttttagtcactgtagctcgcccaacacagtctgatactcccacgttgaaaaaaaaaggaataagttcacttggtgattgaaatctaatctatgactctagatcacaaaaccagatatctcgacccccaaactcttaaaaccggtgcaatttgaatgcctcggcggttttgaaggccggtttcgctgaagtggcgcctacatgttaatattgacctagtcatcgttcaagtggcgtttacgtggcattaaaattttaaaaaatatatatggacccatctgtcaatcacacaaaaaaaaatagtaggacccactaacacgtggggcccacaaccatcctctccttccctttctctccccctttgctgcgctggagcagcgggcggggccggagcggcaacggcggcgtgcgagggccgaaagggagaggggagaggcggagccgccgagcttgtgttgtcgccgccaccgccggtgcctcacctcgcgctcgcgctcgcgccggcgccgtggatgctgtaacgtcccgccttctcaggccgggcctacttacatctagcagcttttataggtcatatgctgctctcacagaccaacacaagtcttttctgcacactttgtcctcactcgtgcgcatttgggaagaatttccaggccaagcatacttaacctcaaagttctttagagatcggcttctggaaaagatcccacctctcccaggctaggcccacttacatctgacagcttttataggtcatagattgcgctcacaaaacaacacaagtcttttctggaagaatttttatgggtcatagactgcgctcacagaccaacacaagtcttttctggaagaattttcaggccaagcacacttaacctcagagttctttagagatcggcttccgaaaaagatcccacctctcccatgtcggggtcaaagactacgctcacagaccaacacaagtcttttttggaagaatttccaggtcaagcacacttaacctcagagaatttctaggccaagcacacttaacctcagagttctttagagatcggcttccggaaaagatcccacctctctcaagccgggaccacttacatctggcagtttttataggcaatagatttccaggccaagcacacttaacctcaaagttctttagagatcggctttcagaaaagatcccacctcccccaggccgggaccacttagatctggcaacttttataggttatagactgcgctcacagaccaacacaagttttttagagatcggcttccggaaaagatcccacctctcccattctttagagatcggcttccggaaaagatcccacctctcccaggctgggcccacttagatctggcagcttttataggtcatagactgcgctcacagacatacacaagttttttctggaagaatttccaggccaatctcttggtttctaaaaaagatcccacctctcccaggcaagcacacttaacctcagagttctttagagatcggcttccggaaaagatcccacctctctcaggccagggccacttacatctggcagcttttataggccatagatttctaggccaagcacacttaacctcaaagttctttagagatcggcttccggaaaagatcccacctctcccattctttagagatcggcttccagaaaagatcccacctctcccaggccggggccacttagatctggcaacttttataggtcatagactgcgctcacagaccaacacaagttttttagagatcggcttccggaaaagatcccacctctcctaggctgggcccacttagatctgacagcttttataggtcataaactgcgctcacagacatacacaagttttttctggaagaatttccaggacaatctcttggcttctaaaaaagatcccacctctcccaggcaagcacacttaacctcagagttctttagagatcggcttccggaaaagatcccacctctctcagaccggggccacttacatctggcagcttttataggctatagatttctaggccaagcacacttaacctcaaagttctttagagatcggcttctggaaaagatcccacctctcccattctttagagatcggcttccagaaaagatcccacctctcccaggccggggccacttagatctggtaacttttataggtcatagactgcgctcacagaccaacacaagttttttaaagattggcttccggaaaagatcccacctcctctcccaggccgggcccacttacatctggcagcttttataggtcatcagaccaacacaattcttcccgatcggtcacccatccctaaattgctacaaaccgagcacgcttaacctcagagttatcggcttctggaaaagaagttgcaacttgttggtatgagtattctattaattctattaagccctaagccggaatgtcacaatggcctcagacggggatggcagaggtagccaatgaggggtggcgggcgggcgagatctcggcgatagcgtcagacggcgacggtgcttcggcaggcagcgacggagtagaggagtagctcgacggcggcgagcgggcatgatctcggcagcgccgcctctcctccctctcttccagccctcgcccgccgctgccgccgctcgcgtctcggccctcgtccgctgtcgccgccgctgctccggccctgcccgccactccagcgcaacaaaggggaagaggaaggggagagagagaaagagagaagggaaggagcggatggttgtgagccccatgtgtaagtgggtcccacctttttgtttgtgtgattgacaagtgagttaaattatattttttatattttaatgtcatataaatgccacgtcaaacaccacgttggacgatgacaaggtcaacactgacacgtaggcgccatgttagcgaaaccgcccttcaaaaccgccgagggagtcaaattacaccggttttaagagtttgggggtcgagatatccggtactgtggtttaggtcactgattagatttcgatcacttttaagggccaccaagtgaacttattccaaaaaaaaaaacctggtgaaatggcctttgctgggccgagcatgagccaggcccacagtgctgaagtggcggccttgtttcacatggtgggctgtcatcaaatgtacaattcactaggacgccacacgaccttttcaccggtcggcgcctttccacattcctggctcttctacatcccgcttttcatcccaaagtaaaattcgcatatgtgaatatgtgagttcatcctagatacatatgcacccgttttgcaggctgtctttgcgatgtgctttccctccccttgacaatgattcctaagcaacaggagtgtgccagaaggattccaaaaccaaagctccatccaaagcgctctgccgctcgctcgagaggttcctacaaaccaaaagaccacacgagatgggacacgacgaacgcttagccgtgcaaaggaaagaggcaaagcgatcgtctcactgtctcaccgatcgagctagctctcgtcggcaacaacacgtaccaaaaccgccgcctactccaaccacagcctgtgtgacagcccgtggaacctcctctcgctactcaaagtatcgtccagttgttgctatatatatagagacgctacgatgtaaacttaatcacaaactcctgggttaagctcgatcgatctggttccctgtagtgaccaagctagcgatagtttactctgtgtgtgtgtggaagaatggcgcgtcaggggagcacgacgcggcggccgcggccaacgacgtcgaagtgcatcgcggcggcgctgctggcgattgtcgtcttgctggtgatcatcgtcatcctgtggctgacggtccgcccggcgaagccgctgctcgtctacgtcgaccacgccgcggtgaccgggttcaacttcacgtccggcggcagcctcaacggcaccttcgacatcaccctgcgcgcatacaaccagaacaagcgcgccgccgtgtggtacaagtcggtcgaggtcggggtgtggtacggcggcacgtacctcgccggcgccgtggcgcccgggttcgacctgccgccgctgaacgtgaagaggatcgacgtggccgcgcccgccgtgagggcggcgctgccgcggggcgtggaggcgaccgtgaagaaggacaggtccgacgggaagctgccggtggacgtgcacatcaagggcaaggtgcggttccggtacggcttggtgaggacacggcgctacaagttgcgcgcgagctgctcgccggtggtcgtcgacttctcgtcgccgagctcgttcgatcgggtgaactgccacgtccatatctgagtgcgcgccggcggcgcgttcacgactgaatgcatggcaaattgtacacatcttgcgtgttttctctctgctttgaggatttgtttgtgtttggattgattcggttgttaaatactggtttgtgacatttcttcacttgtattattcatttttttaatattttttcttcggtgtgtacatgcgtatttctccagcatctaatttgtgggaggaaaggttcatgaaatgtcaagcgctgatgagtgatagaaaacggcacgggagacggcagcccaaacggggtgtgcgagaccgtgataattttcggctcatctgtgccgcacatgccggatcgaacggccggcagatatcccaatgggagtcggatttttattcaccgaacccccgccgcatgcttcgccacagggccggagcgcccatacatcgtggctgacccctgcttcggcccctcgacgccctcgtctctaggctccggcatacgcacttaacatccacagtgacaccgccacgttggcgtaccgcgtacaggaagaagcaccctggcttgaggtcgagagtagttctggtctccatgacggaatcagaggtgcgctgtgtcctgtgtgcagagtagcgcaggcgcatcggcgtggttaaggtgttgttcgtgcggctaacggactacgcggtctttgattgtggattattttttccgctcatccggttcgtacatgcctaatcggacggctataaaagatccagagagtcggtgtttaagattctgaaccccagagaacgctaccgatcctcgatcatgccgtgcctcaccggagcgtcgccacatagttgtcatcctcggcgccctctcgctgcttcctcttgtttttgttttatgctaagtagtactcttcatatgtttgtaggtaacaaactcatcgatttttttcttttaaactatttatacaatctatgattaattgtacattaaattcgttaaaattaaaattttacaataagagcacacatggttatcctccactgaaaaatatttgatatttaattgaatttttaatgttgcacatggtattcttaatgtttcagtaaatattttataaggttttaactagtacaacttattgtttcatacatatataaaaacacttcaacaacattaagtatttgcaaatataacatatttttcgtatgtcttttttgtttcactcgttagaacttattgtctcatataattggttgttgatgctccagttagcagttttaaatgttgtatttatgcagtggagtgaaacaatgttcttaatggagtgaaacaacgttcattttttttggtaaggtcttgtggtaaagattaaatgatataattaaatcataaatcagaaaattattttaatagaaaaatcgtttaaaagataagtgaaaggagaaggagtagccgcgagagagagagggagggaattagcgcgtgcataaaagtatatcaggcggcaggaaccacgcatagtagtttggggccctatatttataaaccacgcatagtagttcggggcgccatatttgtagtacatcgcatttgttccacactatgaaatgttttttcaacgccctcattgcggatcattcattagcaactagcctgttgagtcgcacgtttgtgcgaatataacctctctgtctattagatgtgcttatatgttgtttgtgttaatgagcctaaatgttttaataataattaaaaacaaatacatttttaacacattttgaagtatagctataacactaacagatatctatatctttgatttgtgattaagaatattattttaaaaaataatttatcatatgttaccgtgaccattacctccttcaatttctaaatttaataatgtaaatactcacatcttctacacattgcaattctgtcatgaccagttgagaagtatatatacaatttttaacgtaaatcttataagactgttcagattgtagccaaaataaatcttaccaaattttttcaatgccaaaattcaggcaatatggcaatattgtcaaaattttgacaggatttttttatttatttaccaaatttggcaacaaactaaacgcgaacatttttttggaaactttaaaaaaaattgtatggttgaaaatgacatcaatctaaagtatgaactgctccaatggaatgtcttccatgcaacatgatttgtaattttaaggcataatgaaataatcgatagcaccaggttaattagctattcatctatacattaatactcgttattttttatgcaatagaacttctatgaatattcattggtgatttttttgtcaatgtacttttttttcattctcatatctttcttaccacatactccctccatactcataaagaaagtcgtttagaacagtgacacggtgtacaaaatacaactttaacttcttgtttctataaaaatatttattgaaaagtgatatatgtatacttttatgaaagtatttttcaagacaaatctatacatataatttttacatttttaaactcaacaacttgagagttattcatgatttatattcccaagttttgacttaaacattgtcctttatgagtatggaggaagtatctcatgggtattgcatgaaggttctagaacaacaataatattgtttgctactcactccgttccaaaatataataacttctctatcaacattctcttctcaaccaatcacaaccctccaccattcacttttcccacctacctctaatattcatccaatcacaatcctccaccattcacttctacctactatcttaataactgtgtctaactccaaccgaattgttgtatcgaagggttaatatttgtttgatgatgtggctcatcctgatggcattttggaattctcttttcacttatgcagatatctcaaagggaacgtggttaaggggttcgccagtcatgacaaaaactcaactataaacaaatcacaagttggcaaaattttcctattggcagctacatgtagatggcagcttggatgagattatcatgtaaaaaaaacccaaagctggcctatcatcgcatcacatggtcataacaagtaccccttgttagatcagccaatcaacctcacggcaaaagtgtccaacactccaaatcctcgtctcgctctcaccaaagtcagaatcaccttccccaaacacgtctcacatgtccttaaaataatactcctcccatccaacggttcagattgcgagtcacagtctcagagagcgaggatccaacggcggccgagcactaacggaatctttcctcgctgtcgaaggcagtgggccccggtgaacagtggcacgcagtgcaaccaaccaagcgacgagatcccatatcctctcgagctctcctcctcatcgagcaaagcaaccaagaacttctccttcccctgcttcccccaccggccatggccatgtccatggcgatgtcgagagctctcgccgcgcggcatcgaagccatttgggccaccgaattgaggtgaagagccaccatgcgtccccgccgcggcttcctcttcttcctcggagtcccgggctcacgctcgcgtcgcgcccgcggatgctaccggcgaggcccaggatgtcgtcgagtgagtcggacctgtcgccgacgccgccgtcggagcgcaccatgacggcctgggacctagccagcctctgggtcggccttgtggtcggcgtgccgtcctactacctcgccggcagcctcgtcgacctcggcatgtcggcgctgcagggcgtcgcgaccgtcgcgttcgccaacctggtggtgctcgtctcgctcgtgctcacggccgcgccggcggtcacgcacgggctgccgttcccggtgctcgcgcgagcggcgttcggggtgcgcggcgcgcacttgccggcggtcatccgcgcgctcgtcggctgcgggtggttcggcatcgagtcctggatcggtggccgcgccgtgttcctcctcctgccgtccaggctcaagtcgtaccagccgctgctcgcgccggtgccaggcctcggtgcagcgccgctggagttcgcgtgcttcctcgcgttctgggccgcgcagctcggcgtcatcatgcacgggatggagggcatccgcaagctcgagaagtactcggcgccggtgctcatcgtgctcacctccgcgctgctggcctgggcctacgtgtccgccggcggcttcgggcgcatcctctcgctgccgccgaggctgacgcgcgccgagttctggaaggtgttcttcccgtcgctcaccgcgaacatcagcttctgggcgacggtggccatcaacataccggacttcgcgcggtacgcgcggagccaggcggaccaggtgctcggccaggccgggctgccggtgttcatgggcatgttcaccttcgccggcctcgccgtgacgtccgccaccgaggccatcttcggccacgtcatctccgaccccatcgagctcctcggccgcatcggcgggccggtgacgacggtgctcgccatcgtcggcatcagcctcgcgaccatcacgaccaacattgccgccaacgtggtggcgccggcgaacgcgctcgtcagcatgagcccgcgcaagttcacgttcgccaagggggcgctggtcaccgcgttgctcggcatcgccttccagccatggcggctgctcagctccagcgagagcttcgtctacacatggctgctcggctactcggctctcatgggcccgatcggagggatcatcctcgccgaccactacatcgtccggcgaaccgcgctggacgtcgacgcgctctactcggaggacagccacgggccttactatttccagggcggtttcaacgtcgccgccatggcggcgatggcggccggagttgcgccgatcgtgccgggattcctgcacaatgttggagttctaccgagcgtctccaaggcatttgagacagcctacaacaacgcttggttcgtcagttttttcgtcgccggcgccgtctactgcctgctctgtcgccggaataggaatgaactgaaacaccagcacgattgattgtaatttgcaaacacaaaggagtaaaaaatgttgcaaatgatagttgaaagcaacatcagcaaatgcttggaaaacaactgtgtttgcaagaggggaaagtttccaacactcccatctcattttctcaaacggctgaacgatgcgttttttgcaaaaagtttctatacgaaagttgtttaaaaaaatcatattgatccatttttttttaaaaaaaactaatacttaattaattacgcgttaatggaatactccgtttttcatgtgcactgttcaggttaccattctcccctagcgaacacagccatatgactctagaaaattctcatatgccatatctcattgttgggaaatgctaacccaaaagagagctgctcattgataatgctggtatcgataagttaagaggattagttcaaatttgtgctactactaagctgctggggcaaatgatcgaataattcatgaaacaattctgcccgacagcttacatttcagttggacagccatgtaaagcaaacctacccttcaaacaataatacacatgagccatcaacgagccccgatacactacatgtgccatcaacgagtcctggttttgataatcttccccctagatgccttcttctccatcttctcccttttctttcgggtcttctcatcctcttcttcgccctgcagacaggaggtacaatactgataagtcatatccaaatgtcggttgtgataataatgtactgccactgacaatcactctatttttacctctgaactaccaccgaaaaatgctcctctcaacagaccggaaatcttgtatccaccataagctggaatctgaaaatcaataggtatgtggttaataacaagttaacaatgattggcaatgcctcttggtattgtgcacaactcatcatatgtagctaccatctgcaatgcgcattgagaattttatttaacaacaaaaagagggggccatagttagatgcctgtataacaaaaataaatcgaaacaataattttctagagattttaactcattggccatgatgccatgtgcctacattcctaacatgcctgtgattgcgaggaaaaactgattgaaagtaagagcacaacagcttacagtagtagcaatcagtgacggtaatctaaattggtactgcagtgtggctgttattcaaatataccgctgtaaaaccaccttatgaaccagtggtcacaaaataagttacaagcatagatcagacggtcatggtatcatggataacattcctaggccattggcataattaggttgaatgataatatcaagttcagcacagaatcttcaccagacatgctggaacatcaatcaaataatggaaacatacaaacataggataaagaaagaggatgaggacaagaatttaaatagttttcaaccaagttttcatgttgtaacatgctacagaacaagcaggtttatgtagtttataaatattgactttattctatattgggggcatcccaaacaggggtgacaccaatagtgacatcaacaaaaagtaatcgccatagtaaacagaaatataattgaagtcaagaatggtgtgtgtgaatcttaccaccaaatatgtccaccaaaatttatcagaaaaaatagacatcagctgcacaaagagagtgatatatatcacatcttgtaaatatctgcatgaaaagaagcaaatgacgatttattattcaattatacagcagaaggcatacgaagttttgcatgtacaagttgatgtattccatcaatggatgatgtcaaaattctaaaagtttcaacccactgtgatggtcaaagctctctaattttagttaggagtattcatgtaatttcagctttaaaatttggtaactgattttaaagaagctggatcaaggtctttgtggcgaattttacaaggtccacaactgaaagttaataattttccatggaaaatatccaataattcattttcaagtagaataattaaaaacaattgtgttttccttactcggacattccaccagcgttcaagtcataaccagcattaattaactctccattctcagagtattctggctctgacatattggcaagttgcttgtacggcagaaaatatgcagcagatgtcacagcaagaccaatccaatgcttccaggtgaaagacgaatgcattacagccattctcactactatgtaaataacctgcgcaacaaattaagttatacaagaaatcaggtactagactccgaactcaaaatagctaaagtatataattaggttgtgatataactgattttacggtccttgagaaggtagcaagaggtaccacagtttttagtattaatttgtggtacctcatcaagagataccaaaatttacattaacaaactgtggtacctcctcaagaacagccaacaggtaaaaattaaaaaggaatcccatatggcatacttccaagaaaagaatgaaagcaaagaagaaatgctaccatagcatgctttttatatactggcatttttaggagaaatattaataattgccaaagctatatagtgtttaagataataggttataaaactaaatttgagatccagaatagacccaccaatatccaaattccaaccttacaaaccaaaaccccccacaggaatattggatatgagatgatttcatcttcttttctttctctaatttattcgattgcattagcaactttcgcagatgcagtaggctagaagccagtgaaagatgccctgagatactcctggtaagtgatactcctaatttctttctggtttaagtacgacacaaagggcataaaattcaagtgattattactccggtagtcaagaataaagagcataagtttgatcttatcagagtgaggacttggggtttagtgatctttataaccttctaattaccctaaatttacttcaatttttatgaaaagaagtaccaaagagaaccatgtatacataaccttgttgaacaaaataaaatgcatcaatgcaatgcatggaggcaagatggcaccaagcacctaatcgccgccaaggcaagattataacctttctatcatgaacttttgtgatcataaattttcccatgatatgaccaaaacatgacatgttccacaaacaaacttagaatccatcacagaacatgttgaggtcagaagggaaggtgattctacaagacaaaactacgctagagctttcctccctctcactgagtaccttgacatgcaagactcaaaccttcccaaaaaaataataaataaataaaagaagaagactgaacacgataactaccatagcccagacaactactccagggaccaggcaagatcagctagtccaattcaattcttcaccaaaattaccacccccaaactcatgtatcacacgaccactgccaaaaataaaatctaaccaaaaaccaaccatctagcagcgtcctaagcaattcacggatctgaaaacagaagggggggagggaatcgacggggaccgctcacgttggccgcgaggattaggcgcaggatgaggtccatccgcttcttgttcgcgtccctcgtcttcttcaccccttgcttcgccatggctggctgcagcgctcggaatcctcctctcctccctcgctgggtctccctccccctcgtctcctcctccgctgagatcttattgcctcgctccaaattcactctccgatactgattcttcctccccaatggttctagaactggacctctaaatgggccttgactgagagcttgtgggcctagactttcccggcctctgaggcccattagatcggcaccgcgacggcctcacctataaaacgtccagcgcgccaccgccatcgccatcgctacggctagcaactgcctcgcctccgatcaaaccaacgaattgctctgtgcagagggggagagagagagagagagagagagagagagagagagagagagagagagagagaggggggatggagagccaggagctctgggcgctgtacgtgggcgtggcgtcgctggccatcgggatgctcggggtgctgggcgtctggctctgctacctgttccaggccgtggcgcgggggccgcctccggacccgccgccgccgccgacgccgccctgcacgccggagacggaggaggacgacaagaacgggctctcggaggaggagctgaggatgctgggcgggatctgcgtggcggtggccggggatggcgaggaagaggaggaggagcagctctgcccgatctgcctcgacggcatggaggccgggcgcgccgtgcgcgtcctccccggatgcagccgcgcctttcaccaggactgcgtcgaccggtggctcaccatctcgccgcgctgccccgtctgcaacgcctgggtcaccacgcagtcgccggggacctcgccgccgcgcaccaagcctgctctgaattcttgagatggcagcgtcgccgccctcccgatcatgggtcagttcttggttcttgacgagttcttgatgagttctcgtcgatcgtcatcgtcagtttctaggctctggagagcggttcttggcgatttcttgttggctatcttgtgtttttttttggaggattcggggctgcgtgtaaattgccttggtgctctaattgttggtagaaatcagtaggcttatgcaggtttcagccctttcctactctgacaggtcaacaattttgcccggatttattctaggtgatgaatgaatggaatagctaatactgtgaatagaccaaacttgttgttgataacacattcatgtttttcagaagacatttttccaatttagatgacaatctttatgttgctttgagatatctttgacgaatatccaaggcctgcagctgtaaaattttacatccttgtgtgggggaaatccagatttggcttttgaactgttgaatcctgaagtcctgatgctagtaaatctgggttcagttctgttgttgtgctgtacttgtgaatttctgggttatgttacctgatgctgcttgaagtcaagttctgatgtactacttatgtgtttctgggtcagttccttgaggttaacttgttgctatgaatctctgctgaaacgatccaaagtttcatctttcttccttttttgtcaaatgtttatgattttgtcagtaccggaagagctttagggattgaagcttaaaattttagacacagcagcagatctgtttctgccctttacgtattgtagtattagttatttcctctttcttaaagtagcaccatttaatagctcgttctatgttgacaaaaagtttgatggaagaatggttacatgggcgtaataagcaggcagactttcttgattgttagttcttcgtcgatactagaaatttcagtgatcaaaagaagtaatttcaatggcatcaattctgttcgtaatttcacatgaaaggatagtacaattgaaaaccaattagctcaaaactggaaaaaccttcagtcctgttctatgttaagtgtgagaaaaaaaatacagaactatcctcgactttacatcccttgataagaaagttacagaaaacaattaaccaaaatatcttggtgtggaaaccagctgacttctagaaaaggtccatgatctgtagttctgagccaacctaaccccaatccagccccaaatattgtacaggttccgcagatgaaactagagaacaacaaatgtcttgccctttgtaaagggtaaagtgtgttatataactacatggatccatgagagaattgaatacaacagtagattcccacatgaaactcaagttaactatttcctgtcatgtcaagcatctcatcaagaccttttaatcgttgcagaccttcactgatcaagaacttaatcttctgtttatcgtcacaacggcgatttttttcaatctcagctcttacagtttgcctcaactcatctggacaaagaacattcaagaatatttagttgtaacttcaagagtaaacattagacagaaaagataggaaagcgaggtttaaaaatgtctgaccgcgtgcatgcacaggagctcggcgagtcatgcgcaaggcctgcctataaagctttaaaacacgtgcacgcaggatgaaagcccttaagtccatgaaatgggccatcgaatgacactctaatagaaccttagcaaaatatgatcatgccatgcaaactgtcccgtaaccctggaaattcaggagaaaaggttgcatgatgtacaattctgtgagacctaccggtggggcatgggggttcagctgaacccccaaacgttttgggggagaaatatgctacctctccctccctctcctttaatttttgaccacacacagcgcctccctgttaagacacaccattaaaaaaagtagaagctcttggatcaaaggaaaagggataatgaccattagatatatgaattgcaactgcctttgttgaggaagtttgctacgtgattaactgtcaaggcaaagcagccaaaccaacactgttgtccgtaaaaaggtaaagaagccaaaacaacagtgttgtccggaaaaaaattgaagcaaaatatgttgcgactcttgccaattgtcagtaattaaccacaacagtttgacaagccgtttgcagtgcatataaagaacacgttaatttcctctaaaaccctcctcataatctccttttctttctgtacagcaaaagcacttccaaggtacacataaaaaccttccaaggcttagtcatactaccaaaaacgttcaagaaaaaaacatcagaaccatgagttaacgttgagatcaatttcaggggcggagacagcttgaagccacaccagggcttagttctattaccttgtcctagctctctataaattcaagcattctttctaaaattaatatggaatttgcatggggtttggatcccagaactagggcttgagctctagctgccctaggcctggatccatgctgatcaatggtgagagtaataaaattcagttgcaaagatgccatgcttcaaaaattccattttgctgatgatatctcatccatcaatggtcatatgcttccattgataggtaaaagatctattgtgatattgtacgtcgatagtaaaatttagttactgtacccgcatcctcattttaccatgaacataaatatgcataatcacaaacaaacccacaacatcgtgtggggtactcttagtcagtaataaggttgttggggcttgtgttttgtggcttactaggaatggctttgttttccaaatcattgtgttaaaatcaccctagacaatcttgtataaaatgattgcgcagattcagagatggatggtcctgtaaaatgaataggagcacagtatgctgcaggtgtggtgtgatcgaattatggagcataatattcaagtgctgaagtctcctgacgtgctgccaatggagattgatggatagctgaatgtctgaagtttagctatgagaactgtaatcctgtcactttctgttttgagtgtttttggaggtgtttgaggtggtgtttggatcgagggacttaactttagtctctatatttagacactaatttagagtattaaatatagactacttacgaaactaattacataaataaaagctaatttccgagataatttttttaagcctaattaatccataattagagaatgtttactgtagcatcacataagctaatcatggattaattaggctcaatagatttgtctcgcgaattagtccaagattatggatgggttttattaatagtctacgtttaatatttataattagtttccaaacatccgatgtgatagggacttaacagttttagtctcatctaaacagggtctgatgtcgttgcctatggccctgatgttacttctgaaacttgcaacccagtagtctgtttgtggtgtctagtgtcgttggtaggaatctgttttttttcttttcgttggatgatgaactacagtaagtttctttggctttcttacaaaagtcggatcaaatatgttctatcttctaaaaaaaaagttagtactaaggttaagacaaagaaaaacctaagcttctagatctagaagagaaagataaggtaagggcaaagagaaaatgtgaaggtagtaatggatgagaaagaaagaggatgtgcttcggcacgggtactcaccggaggcggaagcagcagggcgacggcaccgctgctcgcgcgatgtataagaggtcgacgcaggcggccgacgaactcgcgaggagacgggagtcgaggctgatgtgacgtggagactggcttgcgcgcaaggagtcagaggcgagaatatgcggcggaagccggaagcagcacgacgccggcgccgctactcgcggtgatggagatcggcgcgacggcgtaggcggcgggcgaaggagacggaacgggtgctggaggaggggaggccaggggacagggggctgggtcgcaacgcaaggaggcaagaggcctattacgctgctgggtcagtggggtgttgttacaggtttgggctttttggtggctcggtctccatctgttccatctcctcccaaccccagcccggttgaaacaaaaaaacaactagggtgtgtttggaactttggggagaatactaccaatcgaacgtccgatatatcaaaaaaaacatcggtcggtcaaaatgttgcagctgaccaacaagtgaaacattaatttatatatggtgaaacaaaaaaacagcaactaaaacatttaaaaaatttatgaaacacagtgaagatacacgttgaaacatattgctatcacttatgaaacaataagagttaatagattgaaacatatatttttctttcatcaaaatttaatcgtgtgatattttattataaagatttaattacaacgaatacaacggtgtaatcgaatcatagattggataagtagtttagaagaaaaatcattttaaagaccgataaaatgcatgcatgcaagcattgatggagggtagtagcaattatttttgataattttatgaaacacaataaaaacaggtgctgaaacatatggatataacgtatgaaacatgaagtattaatagtttgaaacttatatttttctttaatcagaatataataatgtgatatcttgttataacgatttaattccaacaaatataatggtgtaatcggattttagatcggataaatagtttaggagaaaaaatcatttgaattttgaagacaaaccccgatacgtctctctcattctaaatgacctttccatgggtctcacaccccatgcacacttggaaacacatgcttgcatgaagcgggttcgatttttctcttttgctcggacgacacatgggaagcaatttccgaactttggataatgggatggtaaaatcttttcccaccttctaaaatggtaatttttaatcttaaccatccattcttcatatctcatctcaaccccccactcatatccctatcccaatctcacccctcttactccattatctaaggctgcaggtaaaatggttgatacctgtcgtcgggcaagcatgagaaggacagaaagttggctgccagtatggattttcagtatgttccgttgttcggtaaggcaaactcaacttgctactttgttgggcttgccttagtgaacgatttggatgattgcatgagagacgtttgctctcgaaggagagcggagttgactctcccgagcaagctatctttttcttgcccctccgggataggttgccaccggaagtgatgattttctttttatggatttgctagatttttgtcgatagaaaatagggagaaagactcttgatttttcggtcgtcggatttgcattaagattcgtgctagcgtgtggagggaaaaattcgtgtgaaaatttacttgtgcacttgcacaggatcaaactcaggacctcgtttccgcaaaccatgctagccacttgagttgccataagattttgaaagatttagacaagttacattacatacattctagttacactgtaattatatttgaaagattttagagaaattttctttcgaaagttctatagtaacttcttttatgattccaaacgactggtcttgtcacgccaggctagcatcaaccgttcaacctagccttggatgacttgaatggcagcctagccaagcccaaactctgtattgtgatggatattgtctgtatagcccagagttttcataacacaagggagagatcacactaagcttccccttttcgggtttgcagcccagctcgtgaggcaaggtcacgctgctgctgtaggatcgtaaatgatctttcccacctcaaaagctagccaatgagggatgggctcccccacttatatattaagtttcttgtccttctataaccaatgtggactattcaataatctccccccttcatatattggtgtccctcagccgttcaccaccccttcaccgtttccttatggtctctcaggtatacgttggtgtccctcggcctttcaccgtccattcactgtttctctacggtccctcaggtatacaggctccacaagcatccacggtccatcatgccttcgcacactttgccactcaggttagagatattgaactaaccagactcagatagcaattgtagaatcgtaaatggtctttcccacctcaaaaattaaccaatgaggtgagagactcccccacttatatactaggtcacttgccctttcacaaccaatataagactattcaatagttgcagcgagctgaatttgtggaaacaaaacggctgttcgtaaattgtgcacaaatttttatgacaccaaattctaccgttattaaaattatgcgtaatcttttacaagacattaccccagccctgtgtgttactagtcgcttttgcataaagtttcagaaagccctaggtcaaaggtgtagcacgaagatctgcagtggttttacctcaggtagttttactccattgtggagaacgttgtcggcgcctcggaggttcaggctgcgaggataaaattttctctttacgtacataaaattttccagttttctaattctcttaacgtacttcagttgcagtattttctcttttaccattggttatgaacatacttcagttgcagtattctgtctcaaatgactacagtatatagattaggacttaggtgtagtgatgattctctaattctctactaatcctattgacctactgcatgtaaactgcaagtctacagcatagggtcgttgaagctacttgcaagggtcgtcaggttaattaacctgtagggggagctttggaagatgcagcagtggcaggttcgtcaaatgtcaacgcgagtaacccttacgctgcccattttacaagtcccaaatgttcttgttcgcagcagtcccgggccatcagctacctctctcgagaaaagcagtacagatctttcgatctcccacacacgcctggttgcataaatctatgcgttttcaacttcacccctcctgggatatcgcaagcacgagggagatctaaccatcagatgaagtttctgaattctacgttttgttttgttgttttgattttctttaccagagcgagatcgctgtgctgcaattgccgtcgtctgtcagcttattagttcagtccaggcattatcgggagcgtgaagcggaagcaatggttagttgttgcagcaagaggatgagcgatgaattatgcatggcttctatgtcaatagaaaagtacaaaaggcaaaagcagattaaatgctgaattattgttcttcccttgccgagcagacagaccggtggttcgtggagtgaccaagcctgaaagttctgtcaaaacaagagggttggtggtttaaacatggaccgttgttgaaaaatagattcagatttcactatcaatcttttatgcatcgtggggtcatgacgggacagcgtccaaatttcgaacatgatgagcaaatatgattcacaggactggccaaatattatgcattaatagctataatcaagaatggctttggtgtatttcagagtggcacccactgcctttcaaggagataaggactaagatgtgctaatccctccaactatacatatgtaaatcattttagtcatactttgtcgtctctgttctgttcctgttatacattttctgaatgcccacgttatcatcagcaaatatctcgcaatctttctcatttccggcatacattagaagagagagtaaataaagcgtggaaatatacaaaattgcatgccaatttaaccttataacttagttcatgtgttcgagaaactaagatcagtatacttgaaaaactggtgaaaataattggtcgtagcttgttgagtaaagaccggattttgttccattataaaaaaaattgaaccagtaaatatgaaaagcattgcaagttttgtctaaatgagactgcaagaatcatgatcttacgttaaaagtttaggccggatgcaaatttacatgagattacaacaaacacgacgtcacggcaaacagctaagctcatctttttatagcccaaaaaaactttatagcttgacgaaaaataattctggagaaaacgacccgtacgtacagcggtaaagggaacagctaatcagctaccacacaacacagaatggcaaagccagctagtggataacagaacaaacaagagaagatctgtttgtttaatgtgacgaccatctggccatgtgcaaatggaatctcagcactgtggttctcgtatgctcacctcctaactaatactttccataattttccatgctcaccacaaaggcaaaagaacaaaaaaagcaggaacagattagttaatgctactagctggagtagtaagcactaagcacggacagtaaactgtcaattcttcaaaattaaccattttacatcagctgcagtggcagtaaaaacttttacagtgccacaaacaaaaaggagaagaaattcagccactcgctgaatcactctcacagtcactcaaacaccatcaggagcagttgcattgcagtccaaacaccacctcccctctcttccatccaaaattttacagtgaaaaaaaaatgcacaaactcattgggggaggattaacggtttaaccctcaacagtaaccgggaacaaatcaagagcgctgtacaagtacatctaccacttagacttagcaggcagtgatcaaaacccaaccttaattagtcaagtgattaaccatcactaacgacgccatctactggtataatattcagtaaacctcttcgggaatgctctgcaggccgggctcccactccccgttcgcctgcatccgccgcgccgcctccgccgccctccgcatgctgcgccgccgcagcgactgcagcctctgctcggcgcctgggccgccggcgccgcccgccgcgcgctgacggtgccgctcccccgcggccgtcaccgccgccgccgccgccaccgccccgccgccgccggtgcccgagccgagcgccgcgaccatgtgcttgagctcgcgcttgctgaccacgatcttgacgcgcactgcgccgccgacgtcctcccgcgacaggacgcgcccgccgtggtgcagctgctcgagcgcctccgcagccgccttggactggtggtggtggtgccggccgccggcctcggcctccctggggaagaagcacctggacgccatctccgcgtcacccgctgcgatcgctcgtcgccgccgccgccgccgcgggcgcgcgcaagcgagtactccgacgtttcttgcaagttacagcacaaaggctaaagcgaaggcaaagtgaatgtgtccgctgccgagtaatgtgacgcaccaacctacttatatactactccggggaccttgagctgatgcatttgccttgccttttggtgagcgcagccacaactgtctccaactccaaccgtgtaccacccccactctccctgacaggtgggccatccatcgactcctaccccaacctgcccccacgctaacaaaaaataaaagtacgtccacttctgtggttaagttcttcttaatgtacatgacaataaaaagggcgaagtttttttaattaacactcaaaaaaacaatcatgagacagggactaatcaagatggcgaagttgaatagagaaatgggcgcctcacatggccgtccctctcgcggagacgggggccgggatcattggatcgatcggaagggaggccctttgcaagtaacgtgttgtcactcctcacgactcgatgactcgtggagtctacgaacatttggttaggatggcacaattgacacagacattgttagctacagcagcgcccctggcatgttctccttactgttttcgccacattgccggtggaacactgtagcactgccattaattcgaccgtcaggtattacgcatatgcagacacgtagtagtattaattatccacgtgatcggttagcatatgttagcgtacataaagttgaactatccggagtatgtatacagagcagaggtaaacagaggaatggaatcggatgaatccgttataatattgagaagaggttttgtcagaaattttcagcatatatcgcagataatattagtgtccttttcagggctctcgagccgaatccttgcgtgtttagatgatgaaacaagtctccccatgacacatagttgtagtgatagaacagtcgagcgaacgtcgttgatacgaatttttaatttaaactgtatacatcaaaaacatctcaaactaactgactagatcatagtcctaagtcctaaccgtcagttaacagacataatcagatcgaactccccccccccccctgcccccaccagaattaggacggcaatgcacatcaagcgttcaactacacttccgttcacccgacgatcatctgatggcgaatttattcgtttttataaacagatcgaggacgcgccatgatcgggcgcaagtagcgtatcaacgtacgcggacggagggtgaaccaacctccatgattgaaatcgcaggagcagcgtggaatcgttcgaattccccctggaaattaataatgcaggccgcaagaaaaacgcgatcgatcgcgcaaacacgggacgttgttccaattcaatcgagccaaatgaacgcaggcaataacgtgctagacgcaatattcgtacgtcaagtggctgtacctgtacgataccaagatcgcagcaaccactaagatatggggcgtgaatgatcgatcgatcaacactagctatctctagtgacattgcctgcattattcacaaggtaggtaggtacgtacgtatagctaaaccggtgtatgtgaaacgaattctttctactaacggtggattgcaagtttcttctgctcatgattaactaactaacttgtcaaagccccgcagtctttgccttctcagggggtatctagatagctattatctactgctctttcttatatcaggggcagtgtgcgatgcatatccaatcgccatgtttggagggggaagtaacatggggagagagcgatggattggccgctagctagctctcgtagcagccatttctttgggtgcaaaccactgcataaacaaataagcaataattaataacacaaaccatactaaacaatgccttgaaccaattgatatcaaatgtaccatcgtacatagctttcttcacatggacaaagctagatcttgcgctgtatttcgcgtgcggttgctggccagggttggccaccccgggcccacatgccagccacagttatttaggaaaggctaattagtttataaaatgatgcttgattagtaacctaaagtacgagccatgggcagattagttggatcttaattcgtccgttgcaatgctgccaccttggaggttgcttcaaggaaggctcctgaccacaagcaaatactactactacagtactactatactacgctgttgaaatgcagagctttgctcctctgcggctgttcttgttcgcttgcggccggaatacatgcagccaagtacgtgagatgtacgcgctacggacaacgtgcatgtgaaggaggcgctgcttttcaggtcaacattttgtggaagggttttatgttgtgtttgcgtttgcgcagctctgctcggcgatcccagatttgcgtggaggaaactgctctggtactccatggtgacggctcaggcgcggctcaaccgttggatgctgatcggatggtcgatcgggttcggaaaaggcgtgctggttgcttcgggatgaagggcaatggttttacttgagaattactggagtagtagctgaactcggcgagtgagtgtacaggttgaccattttaactcgcactcaagttacttacagtactcctactcctaccttgtgaagcgaataatgtgatcaacattggatagcacaaaatggacgtacgacgcaggtaaacaaatgcagagttgaatcatgggtacctgtaccacgaattattttttgcaggtaacatgtactagatcggttgggcccaacgccacataatttaaagatccggaaaaaagaaaaccaaaatgagagaggggggaggtcgtgacgcgatgatgatgctggcgtgacgtgccggtgccaccgctgttgaagggacgagtcccaatcgtcgaaattatttcggataagcaggacgcgtagtatccagtacagccaacttgggtttaacagacacggtagggactcaatcacatcgtggacccccgtccaccgtgcacggaccgctggaccgttctgttttccctccccgccagtatccacccgtcggatcgtggcctcacggtccagatcatctcatcatcctttccatgcgggctctagcgcccaaccagttcgtacgccgagacgtgtgactgagctgtcccgagccggtcgatgcgtgtcgcgctgcgccccctttgcctcctcccacgaaagcgctcggagccaggcacggtcgctttcaggtaggccgtcacatgcgcgcccgcgactagctgtccctcctgtctccgcccgcccgcgggctgcgccgcgcggcccagccgatggatggggtgagatcggcacgggcgtctgcaaaccgctggggcgttttgtacgcgcgcgcgcgtcatcgacacggcagccgtctcgtcgggttgtggcctttccaccgcgaacgaacccaccggctcgcagctcgcgcacgtctacgcaacgagggatggcagcgtcacatccgtcgcggcatcgaggcatggccccgggaaagcatcggcatgtgcgctctggcggcggcgctggctgctcagcgcgctactagagctctcccgtgtgtggccgggctggattttcgctggttcatccagccgtttctcgtgttgccgggggtgcgactcgtggactcgtgtggcttctcgcgtggggaggccggtgcaaaccggtaaccgaacaccacgccgcggcggtggtccggtgtttgatacggagagtaggtggaccagtgactcggcgagcggtggtcagaactcagaagcaaatggtgattggggttgcttgcttgatcatcttcagtatgatattttaggggaaatacagaaataggttgtgtttagttcagcgcaaagtttagattttggttgaaattggagatgatatgactgaaaagttgtgtgtgtatgccaggttgatgtgatggaaaaggactgaagtttggatccaacacagccatagtattacgattggaatttttaattagtcggtgttttacaagtacaggtctgaaacgaggaatggacctgtacgttatgtagaagagtactgtatatgtaccttaggacgtgagctccatagtttccttggagcggcacggtgatgagatggtacgtgaaagctagcattcatgatcatccatgatccatttcgatcgatactactagctgtgaggattcaaggaattaacacgtaccacttccctgtgtaaaaccctctgaacgtacccacggcccggactacctatgctttgataagtgatataatgtagttatccctacactgactagtggtggttaataacgaagaccgtacgtgaactgtcaacatactttggtagtgtacacacaatatggttagtaactaactaagcaactcgagattaatttgacatcggtgtaacatagctatctgaaccatccatcgttcctgaatcctgatcgtgtgccttacgcttttgtcactcgcacgctaaatttagatcattcttaattcttactctctatgactgactcacttcccctccctctcgtcatagcactagagcagcaaaggcaatttacagtctattcctgatccaatgactgaatttttgatggtgtgttcatggcaagttaacttcccctctcacaggcactgaacgatctgccatatataacggcgtcgatatcctccattccttgttcacggaaagaggataagtgctctatttcgaagtttcaattcgactctgaaatgaagctagcaagattacctcgaccactggactcatgtgacatacacaatcacagattcacagtaggccatgccactgctacacccttgggccaacacgtaactgcaacccttttgtgtagtaggactgtaggagtagatcttgtcgtactggaagaggaatctttagggatttgctggctcccatttcccagcaacactccatctgctacctcgctgccacacacagtttattacctgacgcaggacacaacttgaagccaaagaaagggacacttcacacactttgttgttccttttcccagctcatcatcttattgaatactattcgtgtgcagagatatgtacatgcatcgaaccaggaaaacggaggaaaatttgggtccaaatgccagattaaaatacatgacatttcaaagttgggatgcaaccattgggcactaactttggcccaactagatcgatcggttgcagcctagtaggaaggaagggaatatcgccaaaaaaaggagggactgatcaccgaagctatacatgttgcgaatcgactacacattcgtagacgtgggtacctagctaaagcactcctccgggatgctctgcaacgccggcgaccaccggcagcggcgccttccgacgaccacatcagcagccgctgccacctgcttcttcgcgtgctgccgcttgagcacgctcacgagctgctccagcgccggcggcagcgcgaaggcgccccctccggcgacggccgcggccacctgcttcagctgctgcttgctcagcacgatcttgacgcgcatcccgccgccggcgccctcggcgccagccgcagcggcgtcggcgatggccgcgcccgtggactgctcgatggcagtgaccgtcttggcgtccatctgcagcctcgggcacctcgccagcttcctgccgtcactcctcggcaccggcgtggcagcctccatctccatggatctgagatactctcagcgctcgcgcgcttctattgcagtggcttttgctgttcttttctcagagttctcgcaaactggctgtcctaatgagcagtggagaacgagaatatatagatatataaaaataacatttctgcgtgtctgaagctagagttttatttagagaggtttacgaattagacagctcataggcacctgtctgtgtaaagattagaaagggacgccacgcaataggtggaatcatttttttttcaatgggattagttagttcggtcgttttaatattgatgcatactcagatgtgaataagtagtatagttatctgtgtcaaaccctatttgcatggacgctagctagcttgggcccatacatcacatgctattggcgaatttctgatcggagactagcactagtgctcccctgcaggtttggtccggatttttcaacagctttacaagtggactgttcgctgtattagcctgcgggcaagaaaaagttttgcctgccatgcatgcacaaaagtataagtatatgctagctgcatgtactacacgaataataatcttgaaatattttttcaaccgtgtatactcatgacatatccgttgtagcagacaaattgaaattagttcctgtctgggaattaggatctaatcatttgcagtgaactttgctgcgaaactccctgcgcgctttcaaacttccaagcatgtcttcagttgctaaatgaaaaacttatatatcaacccacatgaatatattcggatcggactctcgcttttctcatgaaattaatccaactgaagggagtacgtacaataaatacgtacggcaggagtactaagtaggacgagtgtctctatacgcacgtagttgtgtatagattcgtcgatcgagaagaactactgctggagacacacacacccgaatattcaggctgtcaattttggcatacgtgcacgtattcggttagcctagtacattcataaattatctgctgcattttggagcctagttagctaccaatgcattatgcatgttgctgtcacacgagcaggtagatagtacgtagtacgtacacgtacaaatcaatgccaatataattaacgtgctggagatggacaatgcagaaattgttaaagatttaatgaggcatgatcagttgaaatcggcctgggcgacgacgattgaagagattaaaggagtgatgcaatgccttcagcaagtgcaagtgcacaagataaagagagaagcaaatagggtagcacatgttttagcacaaatggtaatgtgttccaagtcctgcgcggagtggaggttgtgtgctcccgcaagaattctagatttattaaatcgataaagagagaagcaaatagggtagcacatgttttagcacaaatggtaatgtgttctaggtcctgcgcggagtggaggttgtgtgctcccgcaagaattctagatttattaaatcgataaagagataagcaaatagggtagcacatgttttagcataaatggcaatgtgttctaggtcctgcgcggagtggaggttgtgtgctttcgcaagaattctagatttattaaattagaagtgtaaccctttatttaagcattaataaagctctctctttaccctaaaaaaattaacgtgactcctctccctcctttcggtctgtacgtaatcacgaaccgatcaaccacgtgaaccggtgaggcggtgaacataacaaacttcgtccaagcgtatacgtacgtgcaaacataaagaattaactcgatcgaagcgtcgttagcaatgtagcatgcatgagcattccatcgtcaccgatcacttcagtaaatcagtagcagctgcaggatgtgagtgaaggccgaaagcttgttgaaataaccgtgagacagagccgaaaggctatgaaagaaccgggcgtacatgcgcgcgcgtcgcacaggctcacatggggctcgtgggcgcgatcactgctgtttccgtggacgccagcccgatggcttcggcagtggccgcccatcgatcgatcagggcatcagggagagggagaaggcacggcataggccgggcggctggatgtatgagctggataacgcgtccattttcttatttgacgaatattctcgttcgcctctcactgctatttatgcgtggggagaaggaattaattgtttgcaggggtttgatattcctcttgtagacgaggcggcctgtcttcgaacagctgatcgaacaaattgatcaacaatgaacaagttcttttttttaaaaaaaaacaaacaaacaaactgatcaggaatgaaaaggacggcgtctgctgctcgcatgtatgttccggagtagacaaacgtctgctcatacagatgtacggtacgtgaactgacgttattccagcttatggtcgatattccaacacagtttgaagctgacctcgacaagcctgcccatggggctcatctattgccccacaatttattgtcagtctaaaattcatccttaaaccgcaataggacgtaccattttttttttaaccgaacattcattggtatcagtctcacgggtttttttatatactttaagtgccatatcaacgccacgccacggcagtagaaacaaccatccgtaccatctcggggccactggtttggggagttgagaggcacgttgtactgcgatttgaggacgaatttcagtctcagcgacataaatgaggggccaaaaataaacttaggctgacgttcgtaggtgggtcgaggcggaatacggagtgaaatttacgcccgcatattggcttccgagttaagtttggaagaatcacaggcaggccacagcccacgacatcccctatcgtcaattggacggactctgcaattttcagtgggtcaccaagcccatcatccgttccagttgcgttttattgagtttggaatgtagggctgttttggattgatgaaaaaaaaaagtgcccctctgaatagtaaatacgatatttcactttgtagataaaattattggcattgacgacaaccaatttatcaccaatctagggtgtgttcgggagtaggggttgggaattttcccttgggcacagaaaacagggtgatgatgaattaacgcataattacttgcgtattagtttaaaaacttgaaaaccgattaatattattttaaaagtaacttttctatagaaaaattttataatttgaaaaacatatacgtgaaaaatgaggatagaacttagaaatgtaaattagtatatggaccatagtaaaatatataggagcaacagtcttgaaggatacagttcttccgatatttctagtactagtacatcaaaaaaatgccgatccttctctgatactcccctgcacttcagtagttctgttcggttcagggttgagacttcaactgtcgttgaggctcagctactaccaaacatagatctaatctccctagtaatcaagagtgcgctaagctatttcccccactgaagaagcaaacttccagcaccaaatgcagaaagagccaagcaagattatcccagcttttcccagaagcaagaccaacggtgtccgtattccacgagtaaacagagttccagggctgcaagctacaaaagacccaatcagcgagcagtagctccgaaagtagagtggagtgcactctaaaaaacacatcagtacatcatccatcactcgcatgttagctctagtgctctgttgcagcgccatgcgtacaagccaccggcaccacactaaccaatcaccatcggcagcgacaacttagctagctccagtaatcacaggttctcgtcctcagatcactctctcaggctcccagctgcaacaaacatcgggacggttacagttttgcttggcttgtttggggaattgggcacgtaaaagtatgttcacaaggcgcaatataactgtgcaaacctggcaaaaatgcagggtcacttttagtgacgagatcaagtgggtgatcaccctaagcaagagcgactgatcgatgcttcggtttttctgcttctcttacttggaagcgttgcattggcgatatgtatatttttcttgtccttgcgtgccgtgcatgcgagtataaaacgtagacccggagttttggcatgcaaattaaccgtgtttctcttaagctgtcgatttggtagagacgccaggatgaaggacttggctgtgctggggcacttgttcgtggcggcgttcatgttccacttcgcctcctacatggtcatcccggcgatcaccgacgtgacgatggacgccgtctgccccggccgcgacgagtgctccgtcgccatctacctcagcggcttccagagcgccgtgagtatcgcgcgtttcggattatttaagtcacattttgcgggtgggatttgtgaaaatggaacggcttttggctaatttgcgcagatcacagggatgggggctcttgtggtgactcccatcgtggggaatttgtcggacaaatacggcaggaaggcgctgatgacactgccggtgaccgtggccattctgccgttgtgtatgctctttgcagcatgacttgggtcaccctagcttgatgaaactgcataatgcatctgtgcacattttcatatgttttccacttttttttctggcagttatactggcctgcaaccgctccaaggtgtacttctacgtgtactacgtcgttaaggtcctcgccggcatcttctgcgagggcagcatgcattgcctcttgctcgcctacgtggtaatgaaaacctcactatgatagatcgatcatccaaatacatatttcaaagttattgagatacgcatcctgaataacgaatacgtatatttaacgagaacatgtgacctgtacaattacgacaacagaaagaatgtatactaccacacaaaaaggagtaaaggacaaactaccaatacagtacaactgaacaaacggaaaatacggcgattaggcccactcgtcagcgtaacagaagtgggcggcccaccgcccaatcagggagtccttgaccaggtgaagtttgtggacgcaggccgaccaagtcggcgccaggcggcgagcggcggcgttcgggctcctctccggcgtgtcggcagcggggttcgtctccggaacactcaccgcgcggttcctccagacatcaaccaccttccaggtggcggcggccgtcgccgcggcgacggccatctatctcagggccgttgtcccagattccggcggagccaactccttcgttgacgaagcatgtgatcccttcctacaaggctcatcctgctccgccgcgacttcgtcttcgtcctcctccgatgaggagatctcaccgagacttccgccgcacaagggcggggtgccgtcgttgtcagacatggtttcgcttctcactggcaggttaagttctttcttgcctaactgcaattcgtgccgatactcatattcttttgttagagtttattgacacctatgtttgatggaattttgactataaactgtaatgtgctgatgagtcattgctgctgcctgtagtttgaccctgtcaggggcagcaattgttaccttcttttacagtcttggggaacatgggcttcagactgcattactggtgtctatcccccacctaatctgacaagtattcagtttcaatgtcagttaaatttaacacgaattttcttttacggttgatgtgtctgcagtactacctgaaggcacagtttggttacagcaaagatgagttcgctaatcttctgttaattgctggtgctgcaggaatgctgtcacaggtacgattgtattttttttttcagcagaactgttatatggtaggctttccagcccggagtaggaattgctttttttacattttctgatttctgactaatgataacatgctgttcagctgactgtaatgccggtcttggctcgatttgttggcgaggatatactgcttattataggactcctaggaggatgtactcatgtaacagcttctttcccttgcatttttgaaccgttatgcaataatgtcagcgagtgtgattgtaatccctgaacaattttgtattatatttcaggttttcctgtatggcattgcatggtcatattgggtacttcctttggacttggcaataattctcttgtagtcttattagactcttacccaaaagaatgcaattttggctatatccaaatgtatagacagaactacgctcttgttttgcactaatttgcaatcaggtttagttgcttgctggttcagcagtgcaatagtgcgtttccagcattcactaaaccaatatcagtcatccattacacatatcttcgctaacgttgtcttaatcatctacaggtaccatatttatctgcggtgtttataattctgagtgcttttgttcacccttctgtaagccatatttttcccaacagtttattaaaaacttttttccttccaagcaattcagaacaatattaatcatcttcttctctgtttttctagataagaaccaatgtatcgaagagtgttggatcaaatgagcaggttggtttttcctattgttgctgatcattgtctttgagtatttcaaatgatgacctgtgttgtattagttgacatgactgctaagtttcgctcattattcctattactttggtgttgcctcttagggaattgctcaaggctgtatatcgggcataagctcgtttgccagcatattagctccactaatttttacccctctaacaggtatttttttcatttgtaaataaatcctagtttataacccttgtttcctttaatttactccatagcttttgctttcttgcggcagcatgggtcctttcagaaacagcgccattcaaattcaaaggtttcagtatcatgtgtgctggcttttgtacggtaagatttcaactgaatatgttcagtgcacactttttatgccatactaagaatagagtatatctactctgcagctcattgccttcattatcagcatgaggatgcgagcagggcaatctggtgcaagtgagatgttggccattgtgcagcatgagcaagcatgatgagtatgctagtagattgtaaatttggccaacctgaaaccattgtaaatttacatactgtacattgtaaatttggccaacgtgaaaccatcccattgtctactatcctgatgggcgaatgactattcccctattcctctgcaaatctccatcagggaagggaaggattcttcttcagatagtaaattgacaactgctatgtcatagaagccagcccagcttgttgtaatatcacctagtagtgtatattgctggaatgatggcctacatatttcggccggagcttcagacatgagttaatgccaatggtagtacagatttcaacagcaagtaaaattttctagaattagcaggattactgttagcatcaacacttgttccattacaacggattggattttacctcgtgttaccaatactactaccacccccagaagtctagtttcagagcttccaattaacaatccacgcccacggtatcgacgcagcgtctgaatgcaagggcccgtggtcacctcccgtcgtggtactcgcagtcggcggcgacgccgtggacgggcttgccgaggcttgcctcgcggacgtcgaggcggcagaggacgcggcggtagaacttggagcggacgaggaggccgaggatgtgggcgcgcgcccgcagcacgaaggccatcctgacgggcaccaccgcggggccgaggcggccgttgttgggcttgctgtgcagctccgcgccggcgccgtagagcggcacctgcttccccaccacggacaccgtcaccacgcgcccgctccgccgcggctgatagaactccgccatctgcacgcatgagtgagcacacacgcaacacgatcgttcagtgcagtgtactgtagtgcggtttggttgtgcatcctccgaataaattgtacttccagtatattattgcacgggaaacttttctgtcggaatgagaaaaattgcacttgcactatttaccgtccggtagaaaacaaggaacaaaaatacagaccggaacatgcacagcaagtcaatgagtctatgaaccatgatagggctgggttgctgcgcactgggggccatcatcttgtacagcaaaaggattccctcgccgcagcacagagtaaacaaagcgtacggcaaaagtactgtaactacggtaaagtaacgtaagctaaaggtgtgatgtctgaaacatagaaaagcagtaagggcatgcccaatgcagggcgcacccttacccacatctcatttttacactgcagcacctgtcagtcggtcatattttacatttaaacccttggattatttttatttacatatacatccaatattagcagtataccccctaaaaatcactaggctcccctccttggctcgattcccgtcctcctggtggcgcgatttccccttctccggcggcgccctccccagcacgacctcccctctctctcctcggcgcctcgagcagcggtggcggcggagcttcccggcggcagcagatcgagcagccgctggaggtggggatcgtggcagcgggcgcggatcgaagcggctgcggccacagatcgacgcggtggcggcagatggaggcgcaggaggtggggatcgaggcggcagcggcggatcgaagcagcggcgacgtggatcgacgcgacggccgcggatcgacgcgtcagcggcagggagcgacgcggcagagacggagcttcccgggtacgcctttctctcgagtccaccccttcgccatcttcttccacagtagcggagcagatcgatgcgtcggtggccggcggagcttcccggcggcggcatcttccatcgtggatccgtcacggggagacgacctcgccaacgtgccgctccaagcgtgcttcgctgttctcgagccggggcgagcagaggtgcgcggcgctctgcagaggtccgcgattctttgcagggcgatggtcccgggcgaaaaagtggggcgagctagggataccctccaaggtggagggttgggcatgccctaagggcaagttttatggtggaggtgagtgccacgtctaatttaaaccatgtcatcttttcattaattaagagataacaattacaacatgtcacctctagtacacaaaccccaatattagtttactctcacacatcatcttatatttttcttggagattgtgtggagattgccccttgcatgaggggtggctcattctctctctcctaactcctctcctccgactcatcacctaatctacgtggtaaatttaggggcaacataaaagggcttatataaaggtgcttatagtacttgccaaaaggcaatccttttgagtgttgacgttgaagatggaacaaaggcctgacatatcacattggctctttgcctgtactatgcaacggagtatccagtggtagcgcatgcagcagcggcaagacagtcatcagggaagtgttgtctttttcctctaaaaaaactatagcagagggaggctgaagagtagtcgttctcaaccggtcagtccttacatcagttaccggctggtctttgtgccgtgacaagaacaaaaaatctgctcatatcggcaaatggcaagcgatggcatccctgactcgagtcacgtgaacaccatgcccaccgatagccaatgacgccactgcttgcctctgggtgttattgcgtttccattccaggtcccctttttgctggttctgtgtagtactagtagtagtaggagtatttgttacttgatcacatgcacttcgcccccactttgcacagtactaccagactcaccagtattctagtgaaagaaaatcgctgcagttagccgagcgggtaacttgacagatgatatttttgttactgcggaacgactcacgagctcaccgtctgtgtgtgtgtaaacgctaagaggttctgtgtgtaaaacgctaaatccaagtcctgcctgaatggccgaatgcaagctgctgcacactcaaattctcaaaacaatgcactatcatgcttaagtccaacagcgcctcagaatagccccaatgcatggctgcgaagtctcatctgagatgatccactccgtcgaggaagcaaatggcaatgcaaggctgcaagctatccccggttcgaggatgacaatggaggagccggttttttaaaacgcaactttgttctgtcttccgagtgaagagctgccgaaaaaactaatcaaggacagagacaaataagaagggaaccgtgctgttaggtttagctttctcccgcacctaggcagtaggttagtatactccaccacactatgatgttcatggggatgctcaaaagctgatctaaaccggcaaaaattccacggactgctggcatcacggtcggaatggcataggagattagtactccactatagtcgtgatagaactcatgttagtaatgaagagcacagtacgaataatcgggacaaccctactgatccattgtacagagcccagatccaactcttgattcacccgtttgtttgtgagttgttacgcagtaactagcaataactaccatcgatttacgccagcctaatcaggcacggaaacgtccgcatcacctacccaatccattcagattcaccaaacgtaacgaggatggcataggcaaattcaggtagaagtacgagcagaaaggcgagggttggggtggtggaaagggcacgtacgtggccggtggcgacggtgaggtcgtcgtagaagaggtggaacggcgtggaggtgacgtgcaggctgaagaaggtgccccggttgcggaagcgcagcctgaccgtcgcgttgacggacatcatcttggtcgggacgcccgtccggtccgtgccgccctggatgtggtacgtctcgaacaccacactctacacacacatggagaggaacagcaaatcgtacagcaagtcaataatggagtagcactactacattttatactcctttcaaatttcaattgattcactagaatggcaccagcacagaaacggctagcaaattgatcgcaatatccgcaattccgcatgatgtccaggaagcaaaaactcctgctcctatattgttttaagtagtactcgttctcctagtattcctgtgtgcatgtttcgcggatgcttttactaggtaggagtactcctacagctgttcattggcaaaatgcgtgtacgatcgtcggaacggacgctgcctctagtaaatgcatgcattcagattggatgtacacagcttgtgtttctcttctcttggaaggaagacgggggcaatcggtgccagtaccgatatctcaaaacttgcatatagttgcattcaatcgaaaacatttgggcagattgacaggggttatagtacatttctaaattttctacttagttgttcgtttgagaaggtgaaggaaataaacggaaatgtacactctacactaccatctctactcgcaggacggctaaaatggccagtgttgatttcttgggaaaacgagagtgaacgaggaagccaagaggtgagagacgcaccttgacgacgacgtggggcttgtatgacttgctggcgccccagagcacgagcaggaagaaggcgaacacggccacgaaggcgaacgccccgagggcgtagcacctccactgcgaggcggccccggcgagtcctccttcgtcgtcgtcgtcgtccccgacgctgccggcgccgctgccctgcgcaaggcgtcgccaggggacgccggcagcggcgccggagcggagctggtcggagaagaggaggcggccggtggaagactcccgggagtggtgcacggcggcgccggagtggtggtagtggtagtgcagcggcgactcggccggggtagaacccgcgaacgacatcttctcggccgcggccacgcctccgccgccgccgcctgcgccgcccgaggccaccacgacgtccgggtgggaggcggcggggctgagcacgtagtaggccgaccggcgcggcgaccgcggcggcgaggacggcgccaggctcgtcacgtcggagtccgtcttcgcgtgccgtgccatctcgggagccgcgcggcgcgatgggcgtgaccgcgtgagcgatagagggcacagtggtggattgtggcgaggcgcaaagcgcaacaggtctgggagcctcttcgttgatagtaagcgcaacggattgtggcgaggtttttaagtggaacgcgaggggttttcgtttccaaagtttggagctgtgtgcgccgcgagggtggcggccgttgggcgaccgcggagtaatgtgggggcggctggctcactctggctcgtggctggctagctactactggcgagaccgcgagactgaagctttgagctggtcccgtatgagcggagagacccactgcattgaaggcctgctcagcacctcggccgcaatggagatgtcaggaatggtcgaaccaattacactattttgagcttaagccacaatagaccttccacggcccatctcatcacacggtatagcctgttaagattattgcgggcgaataagttcatctgagggcccttaacttatcaagaatccgattttgatccttcaatcggaaaacaatacgtaacgggtccctcaactatcaaaactagtgcaaaataagttccaatgatggtttggacggcggtttcagctgacgtgatgtctatgtggctaatttgactcggtcttcatctgacgtggcattgacatggcgcttacgtggcagtttggtttggcaaataatataatcgtgaccctacatgttagtgtcgatggggatactcgtagaccagatgaatagagtattggggtacgttggtacaaggatttatacgatatgacatcaagcaaacaagaaaacaaggattatactaattcgggccttcgtaaggtagaagccttaatctagtttatatgagatagatatggaaataccacatattacaataaagaaccgacgatcctgatattaccggcgagatcccttgtcgagatggtttcgatgagatctcccggcaagtaggcttcacgtcctccggattgtaggctatggcgattgtgtttggcactatgattcaatgatctgaacccctctaagtggtgtgccttttataccctgagtcatcttagtctcaaagtagaactcgaagacaacagaccctacactatatagtatcaacccaatcctctttgagtaggactctaacattcctcttcttgtgaggataatttccataacagcttgtgaatttccttattgtatacggaaatacatcatatatacaaaggtatgccgtatccgcatattcgataagtcgtaggatttgaggaatactttatttttaaccatgatagttagttacacccaaaaaaaaataaaaatggtggggcccacgggggctccctctttcctcctctcccctctcttcatcggtgatggtgagtctacgacattcgaccggtgcgtgaggccctcggcttgcccgagtgagtcgaacccgccgatgaacgctgcggctggcgggaaaggaatggcgcgtaacggccatcggtggcagagcgtcggaggaggatcacgtcgacgtcggatgccgcgacgtcggggctccaggttaggtcgacgaagggcagcgactcccagcagccccaccatgcacatgagagcaccgaggtgcgaaccacctcgtagatgtgaaggcggtcgatgatgttgtcgaggacttcgacgtggagcgcacccagcgcatccggcggcaactccgccttcaccgccgctagctgcctcttctaggtgggcagggaggctaccatttcttagtgcttttcccaaattcgcgtgcgtgcgtccccgtcttaccctgcgtgctttgcttcctcccttccagaaaccctcttccgcctccatcaccacgaagcctgcaatccatggaggtcgacggcgtagcccgccccttcctcctcttctccaagcccaagtccagcaagaagaaacccaagcaagaagctgagccccagctagaacccctaaaccctagctccgcgtcatggagcccgaacattgtgactccaactaggccctactgtcgtggccaccaccgccgccgcggaatccgctatggtgctgtccaccttcgtcgaacttgggctatcgcaatggctagtggatgtgtgcgatttactaggggatgcatagccccatggtcgtgcagcggcagtgcatcccgcgggtgcttgaggggagggacgtgttggggatcgcggagacggggagcgagaagacactgcgttcacgctgcccatcttgcaccgccttggcgaggacccttttggcgtcgcgctgtcctattgaaccatggcaccagcaactctgacgtcccaaaaaggatcatttatgggataagtttttctaggagtttatttgtaaaattagtttttgaaaaggaccaaattgtaaaaaatccaatgtggttggttgcatgcgccggtgcattagggttttccgcctctagtcaaatagatcctccagcgtaagcttttttggcatccaatctcaagttgttcctacttcaattctctattctcttaaggaacaaattggtataagtacgataatgtatggataggaaggagtgtagcaggctagcggcaatatctttcttaatatttgacaattttagctttctgatttatggcatattcagattgtagccaaaatgaaccttacaagttttggcaataccaaaattatagcaagacggcaatattgccaaaattttggcaggatttcttatgtattggtcaaatttggcaacaaactaaacgtatatattttttttgcaactttgacaaataatggtatggttgaaaatgacatcaaagtgaacatgcccttaaactgtatagattttctctcgtccatcgttttgtaccgcacggtaccagtaccatgaggtaccagtcttcatccggccgttgattgctgaggggtacgatggggatgggagtatgcgcgaggttcgctccggtgtggggtcccaacgtttctagctacgtgcggcttcgtttaggtcatccccatcgcatctcacgataccgtcgcccatcgcatctcacgctagcgccgccgcacgggtgttcatctgaggaggagggcgagcgcttctgtaaccgtcgccgtacgggtggtgacatcctggcagcgccgcggccgcaggagtcgtcgccgccgccgctgcaaggtccgccgccgcagtggccggcggtgcagctgcaagggccggtgccatacgcttcaaggttcgccgccgccgtggccggcgcagcagctgcaaggccggcgccatcctctgcgccatccgccgcagtggccagtaagcttttgtttgattttattctgctgttcgttttttgtttgaccggatttgagtatgttcaccattgtttcgctgcaagaaaatttgcataataatactatgaaataaccaatgttacaggaggttgaccaatgcgatactttaatctgggtagaccaagatggcatccaagagtgcagaaggcattcgagaagctttggcttgcattggatcgtactagcatgacaaatccaaccaggcggcaatatgaatggtctaactatattgatagagcgaaagttgaggaagacaaaatgaaacttgaatttgagatggctgccaggattttggctaccgaagcaacatataagaaaaaaatttcaaagctcaaaaaagaggcagaccacgctagaagttggttcatgggttccctagttgttattgtaattcttatgtacaagatttcagagtatatgtatcactgttgactatattatgtctgagctgtactttgctacctgcaatttaacatatcaattttaacaatgcttttcggatttctcacatctgaaatgacatcaaaattatgaatgtggctgtcagtctcatgcatgagtgaagtacatcattttcagattcacatataccatgttcacatacagataaaatagttagcttcagccatgtcagtacaactccaaattgcaatacatccatcatatcttcaattccagaaatcaccaagcattgcatgtaccataaaacatacagaaatataaaactagctgcaaccatgtcattaaactcatctcttcaattccagaagtaaccaataccaaaacacagcttgaaaacgtaatattacaggaaaacacatcaagattgattacagtccaatgactccattataaaatgcctccaatactacaggaacggacaagagcatgacaaatttatcaaacgtctagaacaaattgtgtgcttgtacttcatatccatctcaaacatcttcttgtactttcctgaaattgtaagcttcactcatccatggccgaacacgcacgcatacatcgaagtcccgcgacgatttggacaaggggaaaaaggcggtgtcgagaggaatggatgaggcgccgccgcgaaggggagaatggcaaaccgatggtttgccttctgcagctcttcccagagaaccaaggatgcgccgccgccgccgccgccgccgcgaacgggataccaccgccgccacctagggttctgctactctgccgcgcttccccaactcagccaaaccttgcaccgatccaaaaatccctccatttacgattatacccttccaccgtggctctctcgcgctaaccacaccaatgaccaacaacggtcaggattttagtatctcatggtactagtaccacgtggtacaaaaagaaggaccgaaacaacactctaaactgtaactatggattacttttaaatttttcatcatgtaaataattactacctctatttcaggttataagatgttttaactttagttaaagtcaaactgattcaagcttgactaaacttgtaaaaaaaatattttcaacctaagataaatttattataaaaatatatttaattatcgatttaatgaaactacttatttataaatttagtcgaatttaaagtagtttgattttaatcaaagtcaaagcgtgttgtaacctacaacggagagggtatccctttaattattcttttacattcgtccaatcctatcacagtagttaaagtgctaatctcctttctacctgaccgggctcacctggctctgacgaagcatatacctccttttcatttgccatgatacttgataaatactcccgactggtgtgcgtgcccgactgcccgcatgcctatccttctttttggtctgccttaactgcttgcaagttcgtgttgtcctctcgttgaactctacaaacgcgaagctaacaagtaacaactcacgacgtaacgcgcgagcctagtttacgtgatagacgacgccacgagaggccaaaaaaacggaggacagaaaatacatctgaaaacaccaggcgcgtcgcgcagtgcatgggcacatcactgtcgacggcaagccgccaaaaccgaacagccgaacacgcacacctactactacgatttccgcggaaacacgccacgcgacagccggcgcgtgtctggtactctggtttggcccatacaactgtaccgtcctccccttgcgcatgcagagcgccatggccgctcgcgctgccgcgtcaccggccggtatgaaacgagacgaaggcgcaatctagcagcgcacgtactgtacatccttgcagttgccggagggaggctgcatagccggccgaggcgtaaagtagctggcaccgtggtgtgaactgaaatctcagggcctcgtcgcggtcgttggattgacctgctacgagccagctcaggccgtgcgcgtttactgaacagtaaatatacagacgaaaaaaaaaattgcagcagcttttcgttgcctgcaggtcgtctctcttgcgtatgaccgcacttatctgtctgtcgcgagatttcgcacgtacacgtatcgttcttctttaccggtattgatgtggtgagcatatctaggaacatatgcgaggtaggaactgtgctttttttaggtctcaagtcaagctactagggagtagaaagggagcacacacacatgatgctcggttgacgaaagcgatggtgaattggtgatctgtccaatattgtacaacgaatccatcatacctggtttcccacgaacgggatgcaaacggaaccgaagctaacataggacacacgagtttcatttgttgtgttgctccacgtcgcgtcgcctccagatatatagaatcccattcgcatgccatatgttctgtacttgctgtcttgcttctgtttgcttttgaggcccaccctaacatgttacttagctggtggcctgatcagatatggtgctaatcgctgcaccctgatttggaccgactaaacgtttttttgttcgtttcctacatgcctgccaaacagaacaaagatagctgtttgcacagtccattccaaatcttggccgtgctcccatgccagtgcatgtctttatgacgaaatgatgaccatctatctaaatcacgagattatatgacagtaaccaagaaacggacatgccaatggagtgtttaggcaagagacggaactgaaagcagagatcacatgttgctcgtgtatatggatcgtttttttgcgtctatggagcgaaacttttctctgaaacatggccggcacaaacacaaccgccacgaccgtgtgatccacattcaccaagaccgtgagatccatcacagcaatcccacaatcacgaccgtgagttccacaattaccaagaccttgagatcagtcagcaccacagtgccactgccacccacaaatcaccacaaccctgagatccatcaccaagatgctaaacttttcccgtcgccgttacccaatacaaaaatggccactagccacagcagttcacgttctcaccacacagcctttttagtgccctgattatataatcttcctcgttaatcacagtttctaaatcttagttaccgaatgctaattccacttacaatcatttttatttctttacaaaatgctaattgcgacacgcactcccgaatccccgccgctagtctcgcccacagaagattcgaacacatacagaattacacggaccacaatcgtttggttaccactaatcacatattctaattgatcctgttcctgatcatgtaccgaacacctgccatgccatgccacgtacgtggagtggccaccaaaccccgcgccgctcgttgccgccggcgcgagtggctgtgccggtacacggaagacgcggcttccgtgcgcgccccgatgcgggggtggcggaaaggaggacaagcgttggcagctagctgcgcgcctccacgttgttccggaacgttccatcgcatcgttaactgaaacgagaggcagtattaatcccctagttaaactctggctaagtatagcagagacgccggccgagaggagtggggggagagggaggaggaggaggagagtggctactagtactagctatctttggagtgggcgtttcttggccggcggcgatggagcaggtgcggcggaagagtagcctgaggtcgcatggctcaggcaagtcctcgccgcgggtgggatcgggggtgttcgatgagcggtccggactggcggccgatcgtgacggcggcgaggaaggggaggtggtcgtgaggatcgacggggaggggccttgccgcgagccgttcgcgttccccggccaggatggcggtggggcggggaatgtgagcccgaacaccgactccacggcgagcacgccgcggggggcgagcaggacgtggtccagctggaccaactcgccgcgatccccgcccaaggtgaggcgggacgggagcgttgagttttggaagaatgatggcggcggggacgggggcagcgatgggggtggaggcagaggcggtggcggtggcggtggcggtggccggcgcgcctgcgaggcgttcagcttcaagaaccgggcgccgccgcggccttcgtcgtcgcaggcgtcgtccccttcgctatcgccgcagccggcacacgctgcgggtgcggtagacggcggcgaggatccgcccacgcgtctcatcgggaacttccttcggaaacagaaggcgtccggcgccgagctgtcgctggacctcgacatggaggagctcgggaggccgtcgcaactgcatgcgcagccatccttctcaaactccctggaacgcgaggcgcgagtctccttccaaccgaaaaggcgtgtcgcctcgtcctctgactccgactccgacaccggaggtagccgtaggcgcggcggcgacgacggcgaggttgttcgctgcacgtccagttccactgcagcgggacacttgatgcgagccaaaacgcgatcccggctgatggacccgccgccgcagccccagccggcgtccgcggtccctcccgtcggcgacgaggagaggagatcctctgtcttgcggacgcctacgaagtccggccagttcatctcgggcctcatgaccggcaagtccgggcaaatcgccaagtcgggcccgttggaagaggaggaggaggacccattcatggacgaggacatccccgacgaattcaagcgcgggaagctggacgccatcactatccttcagtggctcagcttggtgctcatcatcgcggcattggcgtgcagtctcaccatcaaggccctgtccgggaagaaggtctgggggctgcacctctggaagtgggagctcctcgtgttcgtgctcatctgcggccgccttgtctccggctgggtcatccggatcgccgtgttctgcgtcgagcgcaacttcttgctgcgcaagcgcgtgctctacttcgtgtacggcgtgcgcagcgccgtgcagaacgcgctctggctcggcctggtactctcctcttggcacttcatgttcgacaagaacgtccagcgggagacgaactcgcctgtgctgccctacgtgcagaagatactgttctgcttcctcgtcgccacgctcatccgcctcgtcaagacgctgctgctcaaggtgctggcatcctccttccatgtcaacacatactttgaccggattcaggaggcattgttcaaccagtttgtcatcgagacgctctccgggccgcccctagttgacgaaaaccaattccttgctgagatgcatgagcttcaacgcgcaggagcaaccatcccagctgagctccgttccactgtaccaaccaagaatctttcagggcaaaggagtattcggatgtccggggtgattcctaagggagaagggagcaagcagctgtcaaaagagaaaggagagcaccagattgaggaggggatcaccattgacaagcttcataaactcaaccagaaaaatatctcagcttggaacatgaaaaggttgatgaggattgttcggtttgggacgctcacgacaatggatgagcagatacagcaggcaacgggtgagggggatgagtcagcgacacagattcgtagtgaatatgaagccaagattgctgccaagaagatctttcacaatgtggcgaagcctggctccaagtaagtgtcttcattgtcagtagtatagtatggttagattccctaatctcctgcaagtgccatcattgctagttcttacaatatagataatcagacaagcaactgcaatttatctgtaatgtaggaactgttagttcgtgcggtggtcgtgcggacagtcagtgttatttcattggagatgctagtatgctaatatttcatcctatatatctttagtattaagttacaggtgtttaaagcttattgaaaacagggattgcaaaaattctgaacttgcacatttctgatcaaattcctaatcacaaacatatgaatactgcaggtatatatacttgtcagatttgctgcgtttcatgaggcaggaagaagccatcaaaacaatggatcttttcgaaggagcacaggagcacagcagggttagcaagagatctctaaagaactgggtggtaatgatctttcacgatattgatttataataacgagtcacagggtgtgtttggttctttgccaatatcaactataccaaaatattggtgttgccaaaaaaaaaaggtgctcatttggtttgcaactaaaattttgttatccctttggcaccaaacgaaataccagtacctacatattttggcaacaatccaaacatgcaccttaccaaaattttttggcaatgaccaaatcttgccattgcccccaaaaaatgggcaaggctaacaatggcagtaatccaaacattcccgtagctagttctgaaaatgcccttgctaatattgttgtatgtattcttctgtaggtgaatgcatttagagagcgcaaagcccttgccctaacacttaatgatacaaagactgcagtgaacaagctcaaccagatggttaatgttgttgttgggataattgtgtttgccctctggctacttattctgggtatagcaacaacacatttctttgtcttcctcagttcacaagttcttgtggcagtttttgtatttgggaatactttgaagacaatttttgaggcaattgtgttcttgttcgtgatgcatccttatgatgttggtgatcgctgcgaaatagaagattgtcaggtagtgggaaagttctttaatcttcattcatgaatattaccttgcattcatttactaaagattgaactacttgaatttcaggtggttgttgaggaaatgaatataatgacaacagtgtttctccgatatgataacctgaagatctattatccaaacagtgtacttgccacaaaaccgattatgaattactacaggagtcctgatatgggagaaggaattgacttctccgttcatgttgccaccccagtggagaaattagcccttatgaaggaaagattattacggtatgtattagtgttcttatcttgttgcaatacaatccgacctcatgaaatctaatcaacaatgaatgattaactatgaatgtaaaaatgcaactatgagaatttgattctgttaatactgtctactggagtccgaaagaagtgcctgcactcttgccccacctaaggcctatgaattagcactaaattagggcataagaacatttcatcatagttacagccttcctatcagattataaaatcagtcaggcatctatgagctcatttgctgcttatgttagtatcttaccacgccgagctaatcaatattttcacttctaaatttcagttacatcgacaacaagaaggaccattggtatcctggtgcaatgattgtcctccgtgatgtggatgacaccaacaagctgaaagtgtccatatggctccggcacacactcaactggcaggacatggggatgaggttcgtaaggagggagctggtgctccaagagatgatcaaagttctcaaggacctcgacatagaatacaggatgctgccactcgacgtgaacgtgcgaaacgcgccccctatccagtccacgaggatgccaacgacatggaactattcctgattactgaatcggtgaatgcaccagatcattcagctatgagattacagagaggaggaaatgcctttgatcgagtttgagctgcaagatcctggtggcaactagcaagtgttctgcgctgcaagagcttggtaacaactagcaagtagtggatagcatgtaaaaactagcaatggttgttattgttagtgtgcttgaagccatcatcacttggtagttggtgcagtatgtaattactggtgctgtgtagttgatggataacgtagatacagagataaagagttttcattccaaatggtgaaagcagtaataaaaagttcaatgggtgaactcctatttctgattccgacggctagcccaggcaaccaacgacccttgccgtgaagctgcgaggccaatggcctgctgcgtcgttcgtcgagtctgatactctggtttttgtatctgatactctggtggagatgtagatcggcgccggctctggtggtgcgcatgaagcaccggccaccggctggtttctgtttaaatggttgcgccttccatcgcgtgctagaatagagggggcagccatggctgcatccatgttgggtccgggtgcaagtaattcagggattgtggagagatgtgggattatctgaccagtggtgtggagtgactctaaagtcacctgacctagaggatcccagtccggtgtgatgtgtgctgcgtcgtacctgaatagaacttgccagaagaattgatttgagaaggtgagattcctagtataagcttgacccaattggcaatgattttcaactcaaacctaagtcaatcaagctaaaactacaaatgctctaactatcatggctaatttcacccgaaaacgaagaaccagtaatatactttatgaggatcgaaattatgctttgatgattccaaatgaacaattgatacaattgggaagctcaatacaggctttgaaattgtgatcagattatatatattaagcacatgtaacaccaaggcatagcaattgtggtagtttatcctaagaattcttcatttagtcacatcgtcttatttcagcaactaactaaagatcagaaccgcagcataagtatccagacatctgccctagatggcaatggcgtaatctttatatttctcattgaaacttataatttcagagatgaattgctcaccaaatctcagcagcatataactccatatataaccacttgctcagaacttcaaatatccggtagcatcaaggttggtctgcgcggtccgtgcctacggcgttgtagctgcatcctgcagctcgaatcccctctccaccgcatagtccacgaagctgtacaagggaagcaccctttcgccatacttgtcaccgaacctgtcggcctccatcttggcctgcgctttgagctcctctacgatgccgagcgctcgatccatgcccagcgcgcgcaggacgctggcattgctcctcatcttgccgttgcccgacgcgctccggatgtcgtcgacgagctggtacaggacgccgatggtgcggccgtagcgccgcagcgcggcctcctcgtcgggccccgcgcctcccagcatggcgccgcaggcggcggagcactccgccatctcgccgaacttcttcgtcagaaccttcatgacctcggcctcgccgagggcggtggcgccggcgaggtcgaggaattggccggccgccatgcctgtggatcccacggcgcgcgctagctccccgaggacgcggaggaggacggcgtggggtacggggtcgggcgacggagtgtgggcgatgacgtgggtgtaggcgagggggaagagcgcgtccccggcgaggacggccatgtcggtgccgtaggcggcgtgggtggaggggcgcccgcggcgggtgggcgcggcgtcgaagcatgggaggtcgtcgtgcacgagcgacgccgcgtggagcatctcgagggccacagcggcggggagcgcggcctcgcgcggcgcgccgaggagctcgcaggcggcgacgcagaggaccgggggcgcgcgcttggcggtgccctcgttgccggcgcccgggaggacggcgtagcgcatggcggagtggattctctccggcgtgcggatgggcatcgcggcgtcgagctcggcctccacatcggcgatcagggatgtccaatagaggcgcaaatcgaaggaaggggaggcggcggcggcggcagaggaggcccggatgggaaggaagcgggtggatttggaggtggaaggcagcttggcgaaggggagggacatggagaaggaggagagagccatggcgctgatgaaagggggagattggaattggattgggggttcacaacttcagatgtggtttccttgacggatttgataacgccgtccgctcttctctttattcgctaaccatccactactagtggagtgcactcgtgtcgtgtgaacctgtccagcaatttctcattcgctaaccatgttagtcgtgtgaatgtggtggcagcacaaatgcacaatggcacgctcaccgcgaacacgttttcctacatttttatggaaaaatttggatagttccaacttgcaagtgtaaaaagtatatgaaattgtaatcatcatgacacatcacagtctttgaaaagtgctcatataagtagggatgtaaatgtgtacattaagtcagtgtgcgcgtggtgatcgtgtacgtttgtatttccttccttctgaaatataaggattttggatggcacatagaaatatttatcttgtttagattcgtagtaatacgacgtgtcttattaatctaaattctctaagacgaatgaagtataatgtttcttttctttttgaaaagagaaaattatatacgggctctaaggccaaataaccatgtatcaatgacaacgatgttggtatctcatcatttttcgacgtcctaaatatttatcatcgaaaacaagtttacaatattatacccttcaataaaaacatatttattttcgatattattctcttcaataatttttttgacgtttatagatttggtaaagcataaaaaaattccaatatcaattttatatcaaaataagcttaagatctaataaattttatgatgattataggttttttaagacaaatatatgctgaacaattcttttggtttcaaactaagcatttcaaaaattattgatagttagaaaattaaaagtttaactaaatcttaacctaagcatcaagagggccctcaatccaagcgaatagttcgttcagattcgtagtattaggttgcattcgttcatgtaggttggaaactcattccctccgggcgaaaaatggagcggtccattaacgcgtgattaattaagtattagctaatttttttaaaaaaatggatcaatatgattttttaagcaactttaatatagaaactttttacaaaaaatacaatgtttagcagtttgaaaagcgtgcgcgtagaaaacgaagaagaggggttgggaaccctgggcaaagaacatagccttagtatgtgtcatatccatccaaagttatttatatttgggttgtttgtttgtgctagctgtggcagcacagccgtagcagctgctgcagccacaattaatttttcgattgctactattgttgctccagatgcctgcagctggaaagtagcacaaacgatcaaccccattgtgggatggaggaactaaaacttaatttttatcttgttcataatacttccgtgtataactattctcctcctccttcatcctctatctatctatctatctatgttcatttcctcatttaactagctgagactgtttggatggaggttaactttatcactatcggttagtcacaattgtgataaactttgtcttgaaaataagagtatatataatgtgtgagctaacatactaataaagtgtgacttaactccaagtgtaacacacaatcaaacactgtataagaaattacgctacacctaagatttgacatggtaaaattcgactatcaaccaaacagcctgccgttcttctcgagctccatgccaactaacctagctctatgacgacctggtcattgattcatatcaccgtcctttaacccatttctgaaggatgtaaatatgtgatgtcgacgaggataaatagaatgaaccggcaaacaaaagtatgttgatatgcaatagaataggagttctaacagggcaagcaaaagagttcgtatctcgggcgttgctagtgaggtttgagccagacatatatgctaccctctttgtcacgcgtacatatgaggtgcacttggcttggaccgaatgccatgagctagctgttccgctgtcgtgtgaccaatgttaattaagtgtgtaaggcggaagaaacatgattgttgcccttcttgtaaaatgagaatttctattagcacgacccatgactattattagtgtttttacagtgctccaatcctcttgcccctcgaggtactaggagttgttaatgttagttgttcattgactaagactatatttggcaatagtatgcataactctacaaatagcaagccaattataagtaggaagggtatcctgtgcacacgggagtacagctgcactcgtgtacacgtgcgtccggatccgttcgatcgacatcctacggccaagtctcctagcgtggcaattttacgaatacacgcccgcctcctccacttctgttttgcagaacagcccatctggtaccgcctcttcagctgatctcgttaatcacggcgctgatatgctacgcctcttcagctcctcttgtggttccatgcgcggcgcgccgccggcaaaatatttcatcgaggcgaaggggatcgttgttttgctctcagatgtcttctgttcatccgaaccttgtgactacttcgaatcattctacaccatcaagagacgaatcattccactacttcgaacctgatgctacggtatttttagtttcttctcattcatatcgttcatatacaggctagttagggatagctggtgctggcgtgcggctgctccatattgcatacatcaagagacaagattagattgcactaattttcgttcagactagctacagatttccataacctggcaagtacactgtattgttgttactgcatattaaggtaggtaactccaacataattgttcactcaaggaaattaaaggtttaatctcagttgtttgctatctgtttttttttttgcagatggaggcaataaatagattggatgtgcgagataactcagatatttattcaaatgatgatataacttctccagtaatagaggatgacaacaccagtacaccaaaaaaaatatcaagaattccactcaatgtaagtacactggcaatttaaaaattatgactgaggtgctttaaaatgcttattgcaatgtatatgtgattttgcagtgctccgtttttacaccagagtgtgatgataagataaggcctgcggtagggatgacatttgaagatattgcctctgttgaaaaattttacaagtcatatgcacaccaagttgggttctcagtgcgtattgggcagcaaaagaagttggatggcgtggttcagtgcaagcactttgtgtgctcaaggcaaggatggaaacatgtgaatgataaggagattgttgatccatcgaagaaaaaaaagattaaattgaaagaaactagatgtggatgtgatgcacacatttacgtgaagctatgttctgataacaagtacacgatagcttccttggttgagcaccatagtcatggacttgtatcgccagataagctgcatttgataagatcaaatcgtgaagttagtgagagggcaaaaactacactcttcacatgcagcagagcaagcataggaacctcccaggcatataggctccttcacgtgagtgatgggggatttcagaatgttggatgcactaagagagacttgcagaattactatcgggacctaagaaagaaaattaagaatgcggatgctcaaatgtttgtggcccagctatgtagaaaaaatgaggtcaattcatcctttttttatgattttgatgtggatgaacatggcagattgaagtatgtgttttgggcagatgctacaagcaggaagaactatagtcactttggcgatatcgtatcatttgattctacgtacaccactaaccagtatgacatgatttttgcaccatttactggggtaaatcatcacttgcaaagtgtgttttatggtgctgcattcttagcaaatgagaagattccagcatatgtttggttgtttaagaccttcctaagagcaatgggagggaaagcccctacactcatcataactgacgaagatgccagcatgaaagcagctattgaaaaagtttttccaaccacggtgcataggttgtgtatgtggcatatcatggaaaaaatgtcagacaagatcggaccactatggagagaagactgcgatttaagggaaatgatgaagtcatgtgtttggagatcagaaactgctactgagttcgaatcacagtggaaatctatcattttggactttcacttggaggacaatgagtggctgtcaaataggtttgacattcgtaaatcatggattccagcatatttcatggacatatctttggctggcattctcaaaacaacttcaaggtcagagagtgcaaattcgtttttcaaccgtttcattcatcgcaagcttgctcttgttgagttttggctcaggtttgtcacatctttagaatgccaacgccaagaggagttgaaggcagataacacaagcatccatacaacatacaaacctgtaactccttgggcaatggagacacaaggtagcattatgttcacgcatgaggtttttgacaaacttcgagaagagattatagccgccagagatctttgttgtgttaaagacattgcacaatgtgatgggttgaaaattgttaccattagtgatggatctcacaagctcagggtagtccgttgcaatacaacgacaatgatagcgaactgttcgtgcaagctatttgagtccgatgggatcccgtgtcatcatattattctagttttgagaggtgaaaatcaaaatgagttaccaactgcatacatcatgaagagatgggagaaaagagtgaaaaggtaatgtgtgcatatactctttgcttgaatcttttagttttagtcagttcatgaaaaaaattgtacagtgcatacactcactatttttttttgaaactggtttcctaaccacatcgttatcgtagggagaatgtgtatgacgaacaaggcaaccttatagaagagaagccaattgactcctcggaggcggcaatgagaaagaaaatatcaattgcacgcaacaaatttgaagatctcatacaaaaggctaagcactcagatgaaggcattgacttcttaacatctagtgtgttcaaccttgaggcacccttggaccaaatggtgtctaatgtcaagcatactagacatgaggagtttgagtcttttcttggttgcacaattcctactgaaattgatatacacccaccaactgatattcattcgagggggagaagcaaaagaattagaagaagcaaggatgacaatactggtaagaagcagggtggcaaggaacggacaccacggatctgcaagatttgcaaacaaatggtgtttcaagatttgcacaggatatgctgcctttgtttgcaaatcatgaaacttgtcctagtgccatatatatccaaacgggttttactcgttctatatgctgatgtgacatgtcatggagatgcctacgtatcggtgagatcccaatttcagtgacatattgatagttttttttagaaaattcttttatccccctctttttaattttttaaaaaacaacttcccccatcacttttctttaattttattttttctatatggctaacatgtagtcactaccatggtatgtcacgtcagcacacggattgagtcagaactcgtttggacctatgagaccccaggataagtttggggggctgaaaaatatattttgtgattctaaaatgataaatatggttgtatgcaaaataactctggacaaaattgcacttctttttttttcataacacttggtttatggggaatttcggaagtacaaattgtgtttgtgccttcaagtaaagtattatctatttgatcacagtggattgatggttgcgcatcctatatacttatatagttcatccccactaagtgcacttaatgctatttctctcttctctcataaagccacatcattctaattatttttagcctttggatggtatatatatggtacaaatagtctcttctttcttctatcataaaaccatacaatttcaatcgtttttttcttcaaaattcatatgtatcaattatataaaatatgttcaccttgcattatatttgcaatcatgtgtaaattatataaaacataggaagtcattttattttcttttacaaaatataatatagcttatttgtacatactatacaacttaatttcccgcagcaacacggcggggtaatcatctattatttggagaaatttgggtcttaataaagaaatccttggtggaataattaatcctgacatattggtccattgagccacctgataaaaaacaaagtttattactcaagttcatttacatatgtttggtttgtgggtggggtgggttggatcaaattcatcactgtttttagggtggggtgataccgtctatccgtaaggcacgagagagttgatgatcctatgttttatattgcagctcatatgccagcaaggaagaaaagtgagttggattggtatgtcaactttttagggataaggccaatccgaatcttagatgggtacaattccatcttacttatttttaaaccaaataccctgataaataaataggttcgacccaacccaatcccgtcccttaaccaaaagcatgctttgattgacccatccaacatcaagttcttttgtagatggattttcatccttccagaagatgtcccctctttttttatgtcatctaaatagttatagaaaattttttaaaaacaatatatgaaaatatagattaatatgaaatataccaatccacaaaaggcaaaattcaacatatataagttgtaaaaaaagttaaactaaatatctctcgagaaataaaaacacttttcggattcttttagacaaagccgtgaccttttgttacgaccaaaccaacgagaaataatcaccggacggcagttggtccgagacggcctgactagcaaaccaatgcaaacatatactactgatcagcgtgaaaacacggaccacggaagggcaagcgtaaatacgttgtgagttattcttcccatcatcctatttaactttcccgcgagtagccttgtagaactccagcagcccagtgtactgtaattgatcgatcgtatatggccgtgttttagttcgtgtgccaaatttttatttaagcatacggatacacatttacagtattaaacatagattaatagaaaacaaattatagattccacctgtaaactgtgaaacaaatttattaaacctaattaatctatcattagtaaatatttactgtcacccgaccaccaactcggccaccgtcaccggcggccgccggctcaacattttcgagggccctaggcgaacttcacactatatgcccttaagaagttaagagtattttttttaacttgtaatatatactctataaaccacaaatactatagtaacataaataaacatttctaacgtggtaaataataaatcaagcagtttacaagttgcaatatagtaatttgtttcgataaaataatatcgatagtatgattgacaacttaaaaaaacatagtagaaacaaagtactatgacctaaaatcagtgagggaaaaatctatataatcaagggcctaggcctaatgaaaactaatccaccatataccttaatttaattagcttatggacttatggtgcactgaatggttgtatacttatattgatcccttgaacggttgaaccagaatggtagaaccctaagtccctaatctaggtaatttaatggggaacaaaaaataaattaaaagaacagttcaattcgaatcagtgaagagaatcgatggattggatcatcacctgatctagtgagaaggatcaatggattggatcatcaattctaatcagtgagaaggatcaattctaagctattgggctaaatacctatatagggtatatacctggatcggagcctccattttggctgggccctaggccatcgcccttatggccctgctccagagccggccgtccggcggggtgccagggacggtgcaattcagcctgccgccgcagtcgccggacttggagctggcctgggcaaagaccgtgttgccactgccgctgagggagcatccggtgctcgccagatggtgacgccgggggaacacgttgacggcccacacgagccctggggtgaggtgagccattagccgccgacgattgggagggcgcccgcgcgcaccgtgaaggtgcagttgttgacgatggtaacggtagcgccgcaggccaatggctggaggatgagcggcatcgagaaggtaaccggtgaagttggagactccatgctgtgaactaccagtgcgagctcaagcgtagtgctagcgtttgttgttatggatttggccgtgattgtgcaagcgtttaaacagtgtatgtgctgaccaagagctggaacatggatatggatcatatgccgtggacctgaggttgttaccgttttttttttttgacaatttggtccttttaaaaaacttattttgaaaactaaccctcgccaaaaacttcaaccaaaaatagactgtgggctcagcgccagttccgttggcgctgagttccaacgggtcagcgccagtgactttggcgctgaacccttgcccacgtggatcaccagtcgatccgattgccgacgtggcgtagggtcagcgccaatgcatttggcactgacctccgtatagctcttaagtatgtgtagtatgcattggcgctgacctccgtatagctcttaactatgtgtagtatattttcaaatcaagtagtaatgtgtagcgcagtggtgaagcccatcccttggctagttggtgacctgggttcgaaacttgagctttgcaccttttttttcgcatttatatgggcaacagagaaataccaaaaaaagagtgcagacatgggggatcgaacttaaaatctggtgaaaaccaaacaagcatttcaaccactgcactatcaatagatcctggtaatgaatagcacactgtctacttattatgtaccacgtccacaatcaactctgctagcgtggcaaattttagcgtcgtactggcgctgagacgttggaccatagcaccaacgggattgacgctaagtccacggtctatttttagttgaagtttttgacgagggttagttttgaaataagttttcttaaagtaccaaattgtcaaaaaacggtggttgttaagagtgattatacgtatgaaaggtaaagttggtcgtagcatcacaaattagaataaaaaattgatactctctccattcctaaatatttgacaccgttgattttttagcacatgttcgaccgttcgtcttatttaaaaactatatatgtataaatataagtatatttaacaatgaattaaatgatagaaaaagaattaataattacttaaaatttttgaataaaacgagcagtctatttaaaaaaatcaacagcatcaaatatttagaaacggagagagtatttagctttggatatcacaaaaccgaattcaaaattgcgttaactttgggataactttccaaatgcaaacttaagtttagaattgtgggctttaccctagttagggagcccttccagaaattctctgaggcccggatgggccgcaaagggggtttggaaatagttttcaaccagcaattgacgcgcctcggtataacctcactagctgcgtcattgccccaagcgcaaagatgagttctaacgatcgctcacctcctcgttttatagcgccttccgcatctataattccccaacataatcggtatggtactaaacaagccaacaagaagtcaacaaccgaccttcgtaatcccaagagtattcctccccgttctttcgcggcccacggtctatataatcatgggcttttaattcggcccagttaggcaaatttgcctcccgtattatttttccttttttttttcttgatgaaatgaaatgtccccatttctaaactgcagcactgtgacccgattcgattcctttgttctccccttcactttgccccgatccgcacccaaaccctagccatctaaaacccccgcggctccgatggccgccgcctcgccaccggcctccccgcctcaccccaagcgccgcaagatgtcctcctcctccgaccccgaccaggagcccacctcgccttccgccgctggcgccgacggcgcgcagccccgcgccccccggtacaagcgtcgcaaggtggccatcctgctcggctactgcggcgcggggtaccagggcatgcagaagaacccgggcgcgcgcaccatcgagggggacctggaggaggcgctctaccgggccggcgccgtgcccgaggccgaccgcgccgcgccccgccgctacgactgggcccgcgcggcgcgcaccgacaagggcgtcagcgccgcggcgcaggtcgtctccggccgcttctacgtcgacccgcccgtcttcactgatcgcctgaatgcgcagctcgcgccccagatccgcgccttcggctacgtccgcgtcaccaactcgttcaacgcgaagaagttctgcgaccgccggaggtatgtgtacctgctgcccgtgttcgcgctcgaccccagcgcgcaccccgaccgtgaggccgtcatggcgagcgttgggagtgggagcgagcttacgaagtgccttgagtgctcagagaggggtaggaaggtgcccggtgtcatgggccgggagggtaaggtacccgatcctgcccttcaggaggagaaatctgttgaggcttcccgggaggaagctgcagtgggttcaaatgaggatgcaaattgtgatcctgcaagcactggcgatcgtagtgttgatttacctatccctgataatgaaaccaatacccaaatcactgaaatgagatcaaatggtgcagaaaaatgtgatgttcaactgtcaggtggtactctctgttctgaagctgtaccagctagcaatagtgagactgtttgccccatcctgaattcagattccaacacgaattcagattcagttgatgttgatccttcatttgtggctgaaaagaaaggtagtattgagactgttgttactgaagatggaaagaaacaagctatggatgttgttactgaagatgaaaagaaacaagatgtggattatgaaggcagcagtctagaagagatgcccctgagaagtgcattttcttacactcatgaagtcaaagagaggtttaatagaattctcaaaaaatatgttggaacacacaatttccacaacttcaccaccagaactaaagcggaggatcctgcagccaaaaggttcatcatttcctttgctgctgatcgtgtagtgaatttggatgggattgattttatcaggtgcgaggttgttgggcagagtttcatgctccatcagattaggaagatgattggccttgctgttgctgtgatgaggaactgtgctcctgagtcaatctatgatgtagcgttccgcaagtaagttccatacaagagtactgcagttttatatagttcaacagatattatttgcatgctaattgatttcttttatcatgtttctgttacagggatgtcaatcttaatgtgcctactgcgcctgaggttgggctgtacttagatgaatgcatgttcacttcatataacaagaaatggaaggattcacatgaggcggtttctatggaaccttattctgaggaggctgaagagtttaagctcaagtatatattccctcatatcgctgcaatggagcacaaggagggagctgtagctctctggttgcattcgttgaacagcagaaattatccagattttcgctacatggataatgctggaactgaggcaagtattgctgctgcagttgagagtgttgatgaagggacggtgccaagtgataatattagtgagtgactcttttcccaaaggaacttgtaggacacagtacttctgtctgttgtatgtgtctggagagaggctttgaaatattgcttatggaaccaagactggattgaaggctgcatctctttttcattgatatacgggcataaatagtcaagttgtgtaatgcttcagcgcttacataggcagtgtttccttggatggacattatttttttccggataagaatgttataaatttgatatatgttacttatttggaggcagtgtcatggcaagttatgacgcctgagaaatgcttctgcaatgtttgtttgctgaaactatcctaaatggttactatgctttataactttctatatgtttcttgttgcttccatccatttcattctagctagaacttgttctatgctatcccattgtgcttctggtcaatattggacattgggaaatggttgactcatttcattgttaggatgtttttatttgctttcttatctatatcagtatacatagttatgcttggttgcatttctccccgtggaatttgaccatgaagaaatacttagatgaggtttttacacttctgtaataaggcaattgcattttttttccaaacataaaactataagagttttttttaacacgttatctctccaagtagtcctttgcttacagtttcatttgttaaaaggttgacagcgaggataattgagaatttaccactccacgatagttaaaaatggcaaatgaggacctgcgaattactgcactggttgatttgttaagttggattttgatttctctaccctatgctgataagatctgtgtggaagctgcaacgagggaagcatttcaaactgtttctctttattatctcttttacttccacaaatactactattttgtacagatggaacgaagaacaacagggcctgcaaactacgacagtgcggcagtgccttcgctagctacgaatataggaccggggcgaggccagctacggatgctacagtcgagcggccaccacgattacgagatgcaccggagcgagtgcagggacgccgaggtgtccatggacgcggcgtcgaacatgcaccggcggtcagtagcctcgatgccgtagtccatgagcgggcggcgctcgagctcctcgtcatgccggcgcgcgcattccgggacctccatctcccccttgctcacgtgctcccacaggtactcgagcctgctcatgtacctcagcttctcgtacagcctgcaagatccaaaattccaaggaaaccacggtaaacaccagcgcctcacccacgaatcgtagtgcagcacacacggagtgattcgttgtatgtacatacccggagctgaagaggaatcgccccaaggtggcgaagaagaggcgggcctggaatcccgggtgcacgaagtacaccgcgcgcagccgctccttggccgcggcaggcagcgcctcgtacgccgcgcggatcgctgcgacgccggggaagttgtcgccgcggtcgacgagggagtggacgtacacgaccacgaactcccgctccccgatctccgggagcacgcgcctccgcacgtaccccctcaacgccgcctccgcccgcccgcccagcgcgcgcgctgccgcgacaaaggaaacggggtcacttttccgccggcaaaagcatcggaattgcggggatctgacgagcgaggccgagctcagcttaccggggaagtacttgccgacgatcctgacgagggcgcggcctcgcttgtctcggccgttcagggtgatcgcccggctgcgctccagcagcagctccgcctcggccatcgcgtcgtccgtctcgtggatcagatcaaccatggcaatcgtcaatcgagcttatccaattcttgtgggggggcttagcttaaagcgagggagaatggggacattttaaatatatacgggggggcgatccatccgatcggggaggaattgacgtaggaggactggacggtgtggcgcggcgcgggggcgctgcgtgggctggttcctgggccgttgggtggagcgcgagcggtggcggacgcgtgggcgcgtggacggggttcatggggggaggccgggaggggggatgcgggatctcgggggaatatgctgggaatattttcggttgggatgggcacggtgggggtgggatggattggcgtggcgcggggtaggggaggcggccgcgtcgtcatccggtgggttttgggtgaccgatcccatggatggaaaacgggagcctttctgtgggcagggtcactgcttcaccgattggtttattgccgcctttgttgaagtccgttgtttgctgttggatagagctcattgtattagttcatgtgaaagttagtacaccaatattagtagctataaacttggttttttttttctcctatatctttctcatacttatgtatttcatgtatttatcatgaagggtagagagcattatttatcttgaagcatttaatatatttctctctccttcatacatacttaggctctcatcagttgcccatttggtccaaattggcttatttggcttattagaaaattaaaattaatttataagtaaaacttttgtagatttgttcgtagcgacttaaaagccaacattaacaaaaattacgttaaaagcattttaaaatcaacttcaaaaattcaaattttggcttattctttggttgtttaggccaaacgatggggctatcactattattcttgctcttacatcgacaataattttggttaatgcgcgtggcaactcaaaaatagccttttttaaaaaaaataattaaaaattattttttaaaaaaatatgcttgaattgtgattactgtactgttaccattatggtacccctaatacaagcttagttatatactttattcgtcctaaaatgtaataatatattcaaatgattgtgtgtgtctaattgtgtgttatattttaagatgatcgagtattgtatcgttatatttggagtatttccttattgggtcatcaatatacagtaatgttcagttctacacgagaaagaagaaatgcatattttgggaaaattcctatcagcactatggggcggagtaagtcactttacatccctcatcttaccatcgagttctaaactacaagacaaatcttaacccctaatttacaataccgatgtagaagaaatcctaaagcagtataggagtttcttttagccgatgttgcacctacgtagcatatagggcccacatgtcattaacatcgtcctctatccactctctcatatgttccccgttattcccctcggtggccacaatgaggtgggtgggaacaacgaggttctcgtcggtgttaacggcctcatcgccctactaacatctacccctccatgaccgctaaaagctgtggccgcctcctcccgagctccttccctttctgacggcggcgacagcccactccctcgtgtcgctctcatccacatcctttgggcgaggccgacaaagagcctcaacatgtgttgccgcctacgacgagtttgttgacaccgctggtacttggtagtgactgagctgtgcactgatcttaaggaatgtgtaggggagatatgaggatgcgacctagctgccacccctctattctccgccatcaccgagttagtggcttgatggttttaggcacggatgccgtggcattgtcgagctcaccgccattaagggtgccgtcgtcggtgtctgctgccgtgttcctggccgtccccgagacaccctgttaacgaccaaatttggtaatcgagttaagtagatctcacaggcctcgtatttttacatcaacacgcccccacctctcctcgccgccatggctacagcggtggtcgccacaaccccatcacgcctcctccaccacaccctgtgctcctattgctctgcacggccgtagctagcagtactctcctcctaatgcctcacggcctccccttagccacgcctctgaggtgcatgagcgtggtggtgacaacggcatggacgcactccctaatggtgtggtgcagcaatccatttgcatctcagtagtgtcagcgtctcccgccacctttgcggccatgtgtcgttacacccgacactctactccctacggggtgccttcgacgcggtgggtggagtggttgcaaccgatggcaccatcgggcggatggtagaggccgcaacgcggtattgtcccttctccgatgtgtgcctgcagcacgggctggctgagcggagcgcctaattgtgggtgctcaagccaataatggactccgccatgtcctcggcgacatcttgttggggatccaggcacgtggactagagcggctccccatgcgtcggtggggcgttgcggcacatctcaagagaaaaagaggggtagagagaagagtatgacatgtgggagccactttgtttttgtcacgtgaacgcctagttagcccaggtggaccgggtcaacttcccacctcactaaaaccagccatcgatattgtcggaggacctaatttaacccggtattataaattgaggagtaaagatgaaaagataggggatgttaactggacttatgccgcactatgccactatgtagagatttcacgggtatgggccacacattcttcagctcccgaacaaaggcaatcatagtcctttccaacaatttttggatcaggccccaagaaccatgttcccatcataggccgccgatttgttgcatgaaggttggatattgtttctccatttatgaacacgcctatgttgacaagatgaagatatttctaataaaatagcatatgttaaaatgaaactatttttccactgatctaagggtatttggttggttaccgtactttaccatgtcatattttagttatgcaatagcttcttatatatgtatttgtttcgttatcgcaactatgttatgccatacttttttagccttatgtcattctcttaaagttgaagctaagtatatcacacttgtgactaactatttttaagttgcacttatgccatcatgacacaactagttacggtaaggttaggcatcaaccaaacatccaaattactctcaaccaatcacagccaattgaattgaatttaactatttatatattttcttttcttaattattataacttttatccaatcattttaatatatatttttaatatctactcctatattagtgttaaaaatgcttatactttttggagggaggtagcaatgggtaggcttcgggaatctgtaatcagaagttacaccgagtcaccgacccgtggtcagagcttcagacgagtcacgtagcaatgggtaggcttcggaccattccatcccctcacccagttactggcgccccgtcaggccgtcagttaccactcaccaggctcatgagtgagcatcacccactccaatcctctcattgcaccatgtactgtaccgcaccaaattaaagtggatctcttaatcaaatgatgtcacggtggccgtgcggcatgcagcaatttcccccttgcaaatatggtgagccaacgatctcatcaccaaaggttcaccaaaccgatgtcgagacaagaattctcggttttcatgaaaacctacgacaaagcaatatcgatgattcgcgtggctaaaagctgaaacggtaacttcatagcaacaaaaagaaaatcaatgatagaagtgaaaactcatagtcgaattaaaattcaatttgaatttatttaaacttaatcagaaaactgcctattttatgctctcgatcctacttagccaatagttttcgtggtaatcaaccggctaccgttggtactgtaaaccctgcacatcactcatttgacgtggttgacgtgatgttaggactataaaaaatagcacgacaatgtataagtgagaactgtcctatctacttctattaaatcatgtttttagttgttgattaccgacgtttcatattatgctgctccgtcctaaaatataacaatttttagctatattttgggattcgtgtccagattcatagttaaaaattactatattttgggacggaggaagtaggttatttagcttatatttagtcaaaattatttaggtttgactaagtttatagaagatattagtaacatctacaatatcaaattaatttcattaaattttaatattcaatatattttgatacaacatttattttgtagtggaaatgttattatattttttaaaaacttggtcaaacttaaataaatttaacttaaaaaaattaaacaagttataatataaaacagagagagtgttatatatatgttatatcacatctaatattagattaacttattttagagggagtatgttgtaatactagcaaacaatactcagttgagatcggagtgggctgggacgatcagggaggcactaagatggatggagtgtctacaacaggtgcaggtgcacaagataaagagagaatcaaacggagtagcgcataagctacctagattagtagtaagttcaggaatctgcggtgaatggttgttaagttctcctgcagaactcactgaactactcaacctagaatgtaaccccaatttcagtcattaatatattctctcttttcaaaaaaaaaaaaagaaagaggttttgaccggatgtgtttcttttcccacgttttatcccgtgaaatgatcggtgtagctaaaattcctgtgtttttaattttatctcttcctgtgttccaaatacacatgaacaacaccaaaatcctgaaaatttctttaaaatgcaaccagagccctgaaaccttttcagactcctttggatcatggaattttggatagaaaaatagagaaattcaattcaaaggaaaatcagatacgcctatggtcaaatccacacggattaaccccgaatcagaaaatgttgactgaaattctacacgtatgacacgtaaaacaaaaccgctctatattaagttgagggggtaatttgtccggtattaaatgttcaaggtgaatatgtctgtttttttatattttttaggttcagaggagataattcggttgaccgtaagagttcgctaggagggggtaattcatacctttatttttttgaaaaaaaaaggcttgaatagaaacggttcactggatcggcgatgatcgctaccggcgcgcgcactagctggcatcgcgcgccttcgtctgacgccccgcggcaggcaagggaggcagtggcatcggcgcgtcgcgcgcgtcagtgcatgcagatgcagctagcgcggcctggcgcgcatcggcgcgtcggcatgcaccaccccgtgatgattaaccgggggctcgcgtcgcaccgacgactacggatcgaatagtcgcagactcgcagtggcctgcagtggcgttggcgcccgcgctccgctgcgacgggccggccggcgtggctaggatcaatgcgagacgtgatgggcttcccgctccgcatccagctgccttggaaatgatggatgcgtatgcctgccatggaggcgagaagacgatcaaaaaaccactttccgtcgtccattcattgctggaatggagtagccttttctcagctcatggcgttaccaccagtcagtacgagtacgactactggagtgccacctcccgtgcttctttttggctgattggtgtaatagttctacgcgattagtataatattcttgcctttttcttgtacgtactatacctcgtgtacgtacgtaaagtttgatggggaggagcatgcgtgtatgattgggattgctggcgttgtagccgggacgtactatgccagctgctgctagtaaactagcgagttaatagccttcagccacgagaagataacctttttggccttttctgcagtcctgtacgtacataatgataaccaacgtaacgtaacgttcctaatcgataaaaacagtcgaattggggttggattagcgggagccaatgagcatatatatgaaacatagtaaccctagttggtcatggtttaagactttaacctctctatactggagtacatggaggccggcatgcattcagtccggcgtgtacgttagtgcctccactgtgatagaccgatgcagcaagggcgtttgtacgtgtcaaacactggtctcgcgctcgcatcatcgtcatcatcagaagtccagacggggttggacaggcacagagatgcagcggtggccaggcagtccggccgcgtggagttgatgatgagttggtgagacggatccggagcaattcaatgcagattttcaatcgaggcacgcagcctcgatcggttcgcaagcatcgggtgtccgctgcatactggatttccgcggggatccgatggcaacagcggcggggcgccgggcggcgtggatggaatttatgggggtggggctgggaggcatcatcagtggcggtgcatcgggggacaaaagggaggaatttggagctgcatgccgcgctgcgcccactgcacgcacacgggccagagctatagcaacgaccactggtttttttttttacacccatccttctggtgcttcccgctgttagctcgctgctgctccgccatgatcatcgcgagcttggccgactcctctcgctcatcatcaaggccgtgatcgccaccctagtgcatccactgttgcatcggtcggtatcctaagacgaaggcatcatgggattctactgtggcattcatatccctgtgtggatgtgctgtagtataccaaactgctagtcaatggagcggcacggaggagtccttttggaactgttaccacagttgatagtggagctcggagaggaggcctgttgatagctaaggttctgtcaatggtgcgcaacaatcgcgctcaggcatgctctttgcttctctttgcagtgactctctcacacgctctctctcttatctcgctggtttggtttgtcgtcgttgatcgagttcacagttaaattttcgtgatattacgtccctatgatggatactggatagagtaaatgaacaagcagaaggacaaaaaccagtagttgtgcttttgtgcaacgccacttcagtacgtgagagaagtatgagaatatcttggttgggcttcagaccatatataacatgggtatagatttataatttgcacgttaaattacaatagttaaaaaaatattccatctaaaactgatgatttagatatatgaatttcaggagttatgaatacccagattaaagaaatattgaattcgaagttgtgtcaaccaagtcttaagaacgaatcaggcaatcagtaggtcatagaaatacaatcctatgtatagagttacaaagagaacgtaacatagttagttgtaacttatagttgaagtataacctatacttcatctgtcctaaaatagaataagtttcatcgttcaaactttatcccaaatataacaacctaatatttataaaactttatctactaaactatctgtctacccccttgattttattatagccctaactaatccgttcttctaccttaacaatccgaggagacaaccaaatgttttatctctcttgttaatacacgtaccaaaagttaaaacttgctataatttaagatggagtgagtactatatattcatgagtatcagttagcttaaaaaacaatactactacttaagtccattttttttaatttttgtctatctcacagatactctaatgcagttatctcctaccttttcaaactcaaatgcattcatttttgcaaagatgaagtttcttagacaaataaaatgacaaaaaacaaagtgtttgagggatggagggaatagatagctgtcggtctaggtagaattataagagcagtcccaacccatagtgtccataagcaatgtctatggtgctatgtcaataagacatcacaatagaaactacactctacaactcatggtttcttaaagtgggccattaataaatacatcatctctcttctctaccaatcataattattctttcacctattatgaaaacactattctcccccaatgcaaagcttgatagtgtctagtgcataggttctcgtgttgaagctgtgtcttgcatgagacccagtttcttcctctctttactctctctcttaattaatacagtgccacataaattaaaagtactacatagcaatgtagttaatgccatagacaccatactaagtggagggttgggactgccctaacaaacacttgttctatgaactactcgctctgtaaaaaaaatctttaattagatgtaacatattatagtacaataaatttggatgtaacctttcgtataatgaatctatacaagagcctatccagattcatagtattaatatatctcacacccaatcctagatttatttcgtgaaacagagagagtaaaacacttgttatgggtgatatgaactttgttctgctagctaactttttttttttggggggggggggggacttctctcccgcgcacgtgaaatagagtgattctttagcgcatgattagttaagtattaacttaaataattttaaaatttaattaatataaaattttaaagaagttttttttataaaatgttttagaaagaaatatattgtttaatagtttgagaaatgtggttagaaaaaacgagggagaaatgagagtatccttatcattgtaccgaaagaagaatcatgggttaagtactaatcatgttctaacatttgagcagccgtgcgtttaaatgggaaatattaaatgcggataaatgatggcagttttgttcacttgatcgtttttattttttctgctggcacttgccagcaggtccaaaccattgcagtttgcaaaagggaaagacacaattatgtgtggtggttgccgcaacactaatcaattttattgatcacgttggacacattgaaactacctataacgctagaaagagcacacctggaccagctctcctcaatcactcacaatttattttcttaatttttgcagtaaagataaaaattgtactaacactcatctgaatcagaatcctgccaaggcctacagccacaatggcaacgtgactttctcgccgtgattgccccacaggccacaggcccagctcacacgatggctcccaaaaatcacaagcccaattcatactgtaccatactccactgtagtaacacagtcctccgtactcttccagttttacttgggagtattttattatactgaactccatgtcccaaaggaaccatgtatccatgatctctacccccccccccccccttttggctgtagaatcaaggcggagacgaaagctgtgcagcgtagccccaaaaatctgtagccatgttgtagtttaatctgtaggtgcagagagactagagaggaaattaaagaagatcagattcatcaccactggtactcctagcgatgcttgcggctactcccaataccaaatccccctcagatctccacacacacacagagaccaagaagcacaatcccatctaaacctgatattctgatctgcccatcccccaaccccaagaatccctcacccaaggccggctacaaccctagcttggagcttcaccttaggctctataaatagagcactctgtaaagggtcactaccttattacagtgagactgtgggaatagtagtagctgcggctgtggatgcacagcttgggagaaaagcagtacaggtcatgtgggcttatcaaaggggcgcttactgagagttctttggcattctgtccacctccttgtcgaatcctcagagacagaaatctcatatctgttgatcttggaggtgggcatactgccaatggagctgtgtaggcctccctttgtaaaacccatatgactcaaaatcaagagagagagggtcttgttaattagatctgattagttctttggaaaccctaaccaagcctggttgattcttgccttatttatttggttcttttaattgtttgggggggggggctcttgttatcttggctgatttgtagagcaaagctacctccatatggcggttctttgatatcttctttttcggcgatctttgatttcctcacatcttgagtgcttcatgttgggaaagataaggccttcctccattttagcatccctctttctggatctatctttctcatctttgattattctaggggtatgttcttgaagaatctaatctctagttcttgatttgttgctgtttcgccatgcaggattggagaacatctcaataatcaccatcgtcaaacaagagaaaacatactagtactcagtacatactctcgctgaacttgtgagtggtactcgactcgatcctaacatgcatgcttcacttcgatcggttctctctgtgacctttcttggttagggtttgggttttgtgcctgtgactggtgatggtaatgatgagatgcggcattctttttctttgccttatcatttcctccctctgtacatgcatcgatctgctccgccttttcttctctcctgttccaatatatattttgctgtaaatatatgagcgcaagttgcgggcagaaatttcatgcgcttcatgatttcggtggcagaactcagcgtgcaccagtcaccagtgcacagtacagctgtctgtgcgtcaaattttgtttagatcggtcttttcatatttcaaatgcgaatgctcccggtcttgggggtatataggagtagatgatagtccatggcctgtgtcctctagatctccaagtagctttgcccaatacaggttaatcattacctgcttggagtacagtggaccattagctttatgtacagtatatagtatgtgctggtatatgacagtatactagtacatgttagtatagtgtatactcctatgattacttattatatattggtcacatatctgccattctacctcacgcaagaacatggaaacgtacgtgcaattgcaaatacatcctgtttcatcattattgtgtgcaatctcggttgcagttttttcagcagactgatactactatagcattttactgtaatttggagtctgaagtttgatcgtgacgacattgatcgattgcttgtgcctgttgctactacttttgtctttccaaatacagtgcaacattacataggccagtcatgttcttggtggcattcctatatgtatatatgtagtatcatctacaagtgattcaaacttgctgtatgataaccgaatgatgttatgcaaagttcatagcaatgttctcgatcaaaatagacatggagaagactgcagtatttacttgtatttttttgtaggatcatttacatcattttgttttagagtactgtctaagaattttgtgttattcggttattcatgaccagttgctactggatagcatgatatgttcatgtgagttttttctttgttgggctgtgtgcatctgatatatgcagatgatggggtgtaatttaatttcttaatgcttttcattatgtacaaaaaatatgcctgtgttcttcatgcacctgcatccatgaattaaaaaaatagtgcataaaaggttctagatatatgacaccaagtggtgttctatgcttctgttattgaattgattagcacacttaaacttgtaattgtttctaaatgacgattgagcagttatctctctttttttttctgttttttgtccactttcttagctagacagtttcagtaacctgattattgataattctaagtggtccagttttgttcagactggcttcaaaatatagtactctagtgtgcagtatcgttcgtattgtttgatcaccatatattgcgagttttgcattatgttacactcctttattatgtttttcttaaggatgactactaactttaccaaggtgaaccgaccctattgacatgctttgttctgtatcagctgctaggaagagcagtctggtggcacataactatttgggacatttaagaaaattttggtcaaactattaaaactttgccatcagttttatgttggactatgttttaacagtatattttccaagggaaatctatgcatactatttattttgtttttatgaacattggagagaagttatcgatgcttaaagttttaacagttttgttccaatcttttcttagacggtaaatatttatgtccagaagttgattatttcgttaattgtgtgctgtgatcccattgtctaattgtgtacgatcagatcccattgttcaacaggtttgtgattttgtctgaagttgacgtcatcatttatttccattatatgattacgtttatcaagtactcctgtggcgtgtagttttgctgaacctggacagcaaatttattttacctggccctcgttctgcaattgattctcaacagccacatttcatggtgtactttctctaattgaatcataacacctggcagtcactctcacgctagctgtgtttgtgacggcccgctgttactgtttgctccggcttgataataatcgtcactcgtcgttttggacacggtctcaaaaaaaaacaattctgattattattttttattataatatgtataaaaatgttaacaattatatgattttattaaagtactttaatctatatatgtagtcactatatttaaaagacaaatacttaaaaatgattcataataaaaaaatttgaagtttgaccttgtcttagagcctgtttggtacagctctaactcctaaatttagcttcaggagttgggactggagtggagttgtggagctgtctaaggccctatttgtttaggcttattgtttggctttttttttttgaagccataagccactctaacactattaagccaaaagctaggttggagaagctttttttggtttatgtgaggttgatgtatgacttcagcactaaacttaggacattaaatctaccggcttataaatcatataagccaataatttgacttaaaagtctaagccaataagcctaagcctaaacaaagagggcctaaacccagctccacaactctagttcattttgtgagagagctccacccaactccacttctagttttggtggagctgaaactgtttggctgagttccaactacaggaggtgtggagctcgagctcgagctgtgccaaacaggccctttgtctaaaacgacaattattattagttcggaaatagcagtaggttttgtctatcaagattaatttttagattggccgtcacatcatgtcatgcagtcctataatataagagattttgagtttttgactacaacgtttgaccacttgtcttattcaaattttttttgaaattattatttattttatttctgacttactcccttcgtcccaaaaaaaagacaaaccctgatttcggtgtccaacgtttgaccgtccgtcttatttaaaaaaatattaaaaaattaaaaagataagtcacgtataaagtattaatcatgttttatcatctaacaacaacgaaaataataattataaaataatttcatataagacggacagtcaaacgttggcacgggaacccacagtttgcttttttttttgggactaagggagtactttattatcaatattattttaagcataacttttcgttttttatatttgcaaaaaaattttgaataagacgagtggtgaaacgttacaagtaaaaactcaaaatctattatattgtgggacggagggagtattattcgagggacaacatcaagattcgttcaaaattaaatgcaaccatatgggatacataggaatttttaaatgatgtcatttaaggctctttcgtttcaatggaaattcataaaaattttagaggattttatttctataggaatttttcctatatagctatttgaatttaaatcctatgaaatcctatggattgcataatgccatacaagttttgaaggaattataacataagatagattctacctcatgaaaacttttctttgagtcttttatctctcctctagttcctatgtttttcgtacggtccaatcaaacaaccattcatgtgtttttctcgtgttttgcaatcctttgttttacacttacatttatatcaaaatgctgtgtttttcatattcctgcgttttctcaatcctgcgattcaaaggggccctttgcagcaattatatcatttaaaatcaaagtatttcaccctaaaaatcctcctatgaacgaagctttgctataaatgaaattccttggcagcaattatatcatttcaaagttatcgtaagtgtttttttagtgtttttttcagtgtattgaggttctttatttttttctattaattcttttattaatccaaaggagatctaaatattttggttgcatgcttgcggctgataagctatagcgcaagcgatggaagacctaattgcctatacacaagcgcactgcaaacagatcttgtggcttagttatgcacacaattaagcaatttcactctacccatgtatgatggcttgtttcacaattagcatttggatatgatttaaaataccatcccaggagaaagcattgcaagaagatgtgttgtgcggttgctatctaggactaggagtttccctgttctctcgtgtcgatcgagcaatgcatgcagagggtagggtgagagcgcccaacatgggaatcaaatcattatggccaccacggccaagattgaacagatactgtaaacaatgaaaaactggcagctttttcgtctatggtgcgtcgagtcaatgagggagatcaagcgtaggagtagctataccattgtgcagcaacactcacctgcaatatccaatccactaccgtgtcgggaatttaagctgcaattattatcctccgctgcccagagagaaagatgtgcatcgtgcaagcttgtagagcttgtaggagtactccgtatgcttggaaagggaagaagcactgcagcagtaatcctactgctgctggagaaatgcttgcccaacagcacaagggtcaattcatatcatgccaagagatcctttcgatgatggccgggagattttatgcccaaacaaggcaaccgggcggagcgtgagaggtggagagcgtatagtggcgcagcatcgagtggtagtagaagcaggctagcagcagcgatccatgcatgccgcgtcccaggacgcgcagccccacagttctgcatgcgccatgatgccgttctctatccctccatcgctcgcttgtccggcctcctccttttgatctcatcatcggcaactatagttacattgctgctcctacctagctagagtaggaggggagaagagatatcctgggcatgcatgcattgttggcttggctaggtgcttgtggaccttttccaagctgaaaaagctaaaagggttctctacttctctagcttggggattttgggatgttcttggcaggctttgcgggagaactgctggtagtgttgacatgccatggcaagggcgaaagcgatggcttgattcactgagcgccgtgtattgcatggattgtctgggcctagctaggttgcaacttttctagtagctggacagtggatttattgatcatctctctctctctctctctctctctctctctctctctctcttcttttttttttggcaagacaccaaggcaaagagatttatgctagctagctcatcacaataccaatgatcgagcacccacactcagggtatgtcttttttttagacggaggaagtatttactgtcataccgcagaaagaaattgtgggttccggccggtcatcatgcgtaattcaagtactccatattcaacacagcaagaggaacttgtagtcttgtagacagctttgtcagctgttgcagcagacgacacggataatgaagagggagacgggtatctaggggaagagacgaccagaactgacctgggcggagtgagtcctggtcctggtccatgagtagatggaagaggttagctagaggcagactgcgccaccccagccatctgctcggccaccggcccatcgtcgcgcccaccgcgtccttcgctcctcctccgccaccggccgccgcagccgtctccacatcgtcgtctcatgagagattgggtggtttcggaacggtgtaccgacgaacatgcgcagtgctccccgtaccctagtcatcgtgggccacttttgttagaacgactttagagaagcatgggcttaatgggccgcgtgggttgccctaggctgcagccgataggctttctgcagggtcacgctcggcctgtttctagtgggccatgtgtaaaaggttgggctgtccatggttttcgaaaggaaaaagtacaccaaaggtccctcaacttgtcatcgggataaaaaatgtcctcgaaccgcaaaaccagatataagaggtcccttaactatacaaaaccggccacagtagatccctcggcggtttagatcccggttttattctacgtggctgctgaatcagcgtgggccccacgtgtcagcctcctctttctttcccctcttctctcccttcctcttctccctctctcttctctggcttcttctctggctctgggcaggccggcgccggggcgaggcggggggggggggggggggagggggggaggtccggcgaggcgaggcgggagaggaggtccggcggccgacgacgtggcggcggcggcggcggcggcggcggcgaggggagcaaggtggattggctggagcgaggggagcaaggcggagctggtgggaggcatcgaaaccgtggacaccggcggcgacggcgccgtggttacgccagggagctgcggaggcgagggaagcattggattaagactcacgggaggcggaacggcggatgaaactggcgcttccggcggtggcgaaggcgccgtcgtacgcggcgatggcttggacggcgacgacaaggtgggcgagtagtcgatccaggcattcaccatcctaccattggtgagctcaaccctggcgccatcaagatcgacaacagcggcggacaccataatcccaagatccaatcccacacgattcccattcacatccccgaactgcacatccatggcaggagagcggcggcggcggcggcgctgggttcgttggcttcttggcgtcgacgtcttcgccgccgctgtcgtgccaagaaaacttgcgttttctccatggattcggcgtgctcgagctcgacgtcggcttccaagcgggaggatgcagcgaagttgacttggcgttgacagggatgaaagagatggactcgccggggccgacggggaggtttccgacctcgggcgtcggccatgagcttggtgcccttgaggaagaggtggaagtcaggggaaaccagcgcgagagtgaaggaggaacggagcgccgtcctgaggtcgctgacggtggcggaggcggcctcctcaccctcgccgccgccgatgccctcccctgctcccgcgttgtcgtcgtcgccgccgccttgctcccctgatcccgcgtcgtctccgctgccgccgccgccaagtcgccggacctcctcccccgcctctcgcggcctcgccccggcgccggtttgcccagagccagagaagagagagagaagaggaagggagagaatattggaaagaaagaggaggctgacatatggggcccacgtgggtcccatgctgactcagcagtcacgtaagacaaaactgggatcaaaaccgctaagagacctactgtgaccggttttgtatagttaagggacctcagatatctggttttgcggttcgaggacgttttttatcccgatgacaagttgagagactttcggtgtaatttttccttttcgaaaattcggttcagcgaaagaaaaggaaattagagagagagagagagatttatttttttccctgtaatcaaacaagtgccttcttgtcaatttaaaatcctttccgtgtataaagaaatctctgaattctgatacaaaaccacacgagaacagagagatctcccgtgtacatctctgcccacgaccgtggtggaaacgacctcaacttctaaccgagcaatcgtatggatccggccatagtttattattaggtggaagagatcaaatcacatcattacgtttgcaaactgccgaatagcttgaaatttctttttgggcgcaatcacagcagagccaattccctgacgttgacagggctgacgaaagtccggttgccggtgaagagcgtctgcgcggcgatggccgacgcagcctgcgtcgggtggttggcatcccagaacaggtggtcgtcgcggttgttgcacagcggcgcagtctcgtcgcacccgagcgctccaaacggccccgacccacagcacccggactccagctccgtgaaacctacagggacaaatcaagaatccatcgatcaggctcaaggtagactcacaccatcaagacaaagacattaacgtgtccatgggccgtttgattactccaggcgttcgtgcgcgggttggcgaagatgaaggagaccatggcgaaggagtcgctgagggagtaggccatgctgggcagctcgtcggcgaggtcccggagcgacgcggcgagcgtcgggtaggaccgcagcgagagggtgttgatcgggccgtagcatccgcgcgtgccatcctccgacagccggcgggcccgctgcgacggggtgcagcccagcggcgtgatgctgacgacgctgaacttcctcgcgcctagccggtacaacgccctcacgtaagacctgtacgccgcggcgaaacccagcagaaactcgcggtcgtcgccgttgccgccggacaaggagtactcgaacatgtcgttgctgccggtgctgatgaggaagatggacttggagaggagagtgttggttgttctcgagcctgacagcttctgcatcatcgccaccaccttcgagaagtactgcacttgctggaacatcgggattacatccccggccttcagaaaaacaagttcgtttcagcccgggcggcacggtcatacgtgtcacgtgtcatatggttcagaattttcagaataataacgtgtgttactgatttgttcaagttaaacaaaccccttggccggttttgtcaccgaggcctgatccgcctgatgcgaagttgatgcccttgtacatctgcgaaacgatggtcttcgctgtcagcgacaggtacgccggtgggctcattgggaagccgagctgctgagctgttcatcatcgaagcgtgccacgcggcacatgctggttagtcatctaaatagagggcaccatatattcatctgggatcgtacgcacctagctggtctgccaagttgtagccattgctgaaccggccggtcggcgtcgagccggtgaagtccacgccgtgcttggggtaattggctcgggcctgcttggtgatgttcaggtagttgttgttgcccacgtcaaccgtcgagtcgccgaacacgaagaccgcgggggcaagctgtgtcgcctccgccgcgaccccaagcaagcacaaagccaccagcacgtatgagaaactatggctgcccattggcacacctgctctctgctctctgctctcctcagcttcgggtgatggatgcttcagcctttgtgaccgtagatatatatacaagaatatgcaccagaaagaaatatactgtcgattctcgaatatgatcaccaaagcaccaacttgttaattcaattgccgtccacgtccattctgtattgctgttcattctctagcgcaatcaaacaaactggtgttttcaccctctgaagaattccatttggcctgcagatcggtaacctggagtggcagtggtgaagagccgagacggcgacttcaggacagatacacaactggcgcaagctgaggacataccaactgggaccaagaacggcatggccggcatatgtgtatgtacctacatgtttagagtttgtattccgatttggcaccaagtaagcagctgcgatgtccttggctcatccgctccaggctcaaattatcccgacttgggaacacaaacaccgcaaataccaacaagggcaacaataataacggagatgacattttggtatgtgtatccaaactacaccaccgcctaaagcacaagccactgatgaacacagcccagcatatcctacgcaccaatatcaccagacaaacagacacatagtcggcgacgtacaacaattagtagtactacgttacacggtgacactgccacgctctagctagtgctggtcatccaccagctgcctgaaatttatcggcgcagcgaagcggaccgagccgttgtatatggccgcggcggcgatcttggacgtggcgtgcgtcgggtgcagcaggtcccagaagaggtagtcgtgccggttgtcgcacagcgtggcgttcggcgtgcacccggactcgccgttgaacttgccggagccgcagcaagccgtcgtgacctccttgaatcctgcacaccaatgccgtgtcacgaaactctgaaccttgcgttggtcagaaatccgaaactgaagcgtagaatgttcagataccgagtcgttggggatgcttcatgatgctttgcaccacggcatgggagctcccgatggagtacttgaagccgctgaagctcacgctgaggccgtgcatggcgtccttgactcccttgttcaacccacgggccagctcgttgaggacgtcgatgcaagcgcccagcggttgcaggcttctcgggtaggggcagcacccgatcggcgggacgtcgatcacggcgaacttcctcgccccgagaacgtacagatcctgccgcgctcacgcgtcaactttcagttagattctttgtgtttcttcgccgtaaaattgtgtgatgagagacaagcgaaaggtggttttaccttgacatgatttgtgtagagcgatacgagattggtgacgaaccgctgcatctccgcggacgacggcgtgctgttcgcggagaagaaggcgaagatgtcgttgccgccggtgctgatcaggaacagggatctcgacagcacggtgtcagcggcttgctggctgatgcgtgctgagatgttgcgttgcacggcggcgaattgctgcacttgcttgctcattgggatgatggattgaccctgcacacacgtgtttcgtcgtcatcagccggtgttcagcgaaaaatcgtgcagtggctttgggtttatgccgacgtgcttactgttgagtcgagaatgcctgatcctgcagaggcaaagtttgttccctggagccccctgaacaatgggttgctggttttgttagccacggcgaggaacggtggggggctgcgcctgaatcccatgttaagagctgacagaggttgaagaatattgtgatcctcgagatatacaacaaaaatgcaagcgctactccgtgctcgtggcttacacattccccataataatactaactattagagcaagtttaatagtatagccaactactagcttcaatttatttatagccaatctaatagctcattcatacaatagttacttataagtatatactacaccattaatatatggtcccacctctcatatgcacaatgtattatagtccatgctgcaactggctacaagtttatagcccgtcttctttatctctcttctcttctcttctccatatgtgcttacaactgacttgtaccctgctattgtactcgctcttactactatagaagcaatgatcccgataaagcctaactaacatgaaaccattattcatccatatgtcaaacctttactgatcaatctctaactgttggagaagcattatagattggaattcgatatttaaccattcctgatcggaaaagttagcgacatgtaagcaatggttctcagctgagaaacattacatatcaggcaagaagagtacatgacgaaaacaccttccttctccctctaggccacaacaccatccttctatttaatgcatggccaaggcccttcttggtctcttccatggccaatgagcctaggtccgccatgcttcttgccctaccctccccaccagtgaccaaacccctcatgtcaaaatatataatgaacgacatacgctttgagaaagtccttttagcacctaggctagccaccgcaggtttggtgaggaaaacaataccatgagaagaaaatatagtacgcatcgcgaaaacgattatgctacagacgcgctaagcgcaactacatttagatgtagaaaaaccgcatctagacaacataaaaaaaaggaaaaacacctataatattattgtaataggatcttcgagatcgactcggaacaaagcgaaatgtgtgtgtattgtattcatcatacctgaaatcttaagatgctatcacattggaaaatatatatatatatatataatagttacaaatattaattttattatcgatgttgatgtttcgcgtacgattaaatctttattttcttttataaggcatttgccagcaaaaaatgtatttgaatttttcaaatacgtgcgctgctcacattatcgtattttggcattatctcccaatctccatcccaaacagtcccaacgcttaaaaaggcgatcgcatgacctcgatgttggaccgtacgtcagatcgtgtctgctgtagatttgtcatgtgtgccgtagattttggtaccaattcggacatgcaatgagtgcgtggtggcccggatcaaggctagtacatgcaagcgggtcagccatttatgtgcgacaagcgccaagtctcgagtgatcggtccattcagccgcgcccgcctgccaacagccggacactgccactctttgcaagcatcgcttcccaaagcctgtgtgcctgcgccccgtgcggaagtggagcagcagcgaattaaatttgaaaaatactgttcattcaattttatttttaaaaatatttaggatgtaatttatttttatagaaatatacagtcgatctcatacaaccgaaaataaaaataatataggggtgacatcaacgacggtatcgtggggcgaccgcacgaccgcgcgctgtcgcaggaatgacgagcggtctcgctcatgcagagagcgacaccatcccaaactccatttggttagtgactaatgatctaattaactatttaactaataataattaatgattacttaataattgctaatcataataattaatcactaattaaccattttgaaatctggtatcgttctttcatttcgcaagaccgcgcagtctcgcgcgataccgcccgcgaagtcgcaccacctcacattcgcataatgattgtgcaagatcaacggtataatttttttaaaaaataaatctcgaatatttctaaaaataaaatgaattaacaatatattttcaaatttaattcgggcagcaacgagccaactatcgatttaagcataggcgacctctggaatgtgtgcgccacagtggcacactgccctggcgttgcgcacttcacagttctgaagtatggggttcttcttcaaaacattttttatgttctatttactccctctcaaaatattgttatattaagataagatatgatccataaaacaaaaacaaatctaaacatactctccgtagtttttttttttacaaaggtagtatggcacaacctttgttggttttttttgggacggagggagtatgcgacaatctctccgttttcaaagcaatttccacttcttgccttcggtaattggaccgcggaaatagtatagagacgaagacttaatcgtctccagtcttcacccctactcaactctagcaccgttacaaaacttgcaatgccgaagttgacaaaaaacatgcagaaaaaacgaaacaatcaccggctatatacgtggttgtcagatatgcaacgatgccagccgctactataccgcgaagtgccgaagtatactcgcatcgcatggcaagcagagtcgcgaggcaatacagcacaggaaagacgggcggcgaagctgtacgtacccaagaagtcgacgccgttgtacccgttgctgaaccggccggtgggccgcgacgtggggaagtcaatgccgttgtgcgggaagtttgcccgcggcacggcggcgccggtcaggtagttgttgttgccgacatcggccgtggagtcgccgaacacgtatatcgccggcaccttcgccgccgccgccgcggtgatacagatggccacagcaacaagcgcaatcggcggtagcatctgtccagccatgccggactgcgaggtgcagtccgctggctctgggtgggggctgaacggcaaacctatcccttgtttgcttttgggaaagggaggggccgcgaccggagcggcaatggcgcactttaaagggcgacgatggcgagctgcgtacggccaacgccttttattgagaccggcaaggcgtggcacagcacttagaccaagtagtagtacaaagttctttacttggcttagctttggtaaagagagatgtgaatgtgacctggtcacctggctatcgcgcaaaacgttgctcctcctcctgggttggtcatgggggtctcctggtcgaccaggagacagtctactactctcgtactcctacacgggaagagtaactggatatacagcgaagaaagtcgatcgatcaaggtatcctactatcctggctcctacatgtacttgtgacaaaaccaagaagatccctcagtctacttgtccagcaaaccccgtcaaatttactcgccacgatctcatgctccctggtggtcctacaggcgaattatatcggcatgatgttctaagtgcctttggatactctgtctctcaagagtaattactgctacttttcacagaaaatcgatccccgggaggccgggactgagtgggggtaacttagcttgatcagaaccgattacttggatcaaccccgttgtccataggaacatattctaccaaccactcgatgcatttgtacaggcaggaaccttaacacgtctacaagccttgaagcatagagaaaggcagccggaatccaatgatacggtaattactttcgatgtttgcatttgataatgctccagtgggatgaataggcagccttatggctgggcacacaagtttgcgctggccgattcttctacgcttaaataagcacccaataattatatctttacgtttagttcttttcatactgtattgttcttaccatcacttacaactgaagctagcctgccagatgcacctttttttgcccaggcagaaaaagaagatcccatgcacagcatggctttttttcaatctttctcctgttgaaagcaacgaaaataaaacgacagcagtgggcagcgcaaccttttccttttgagactcgggcagtaagagcaggtacaatagcatgctataagccagctgcaaacatatttaaagaagataaataaagagagaagagcagtgggctacagatttgtagccagctgtagcacggactccaagacatagtgtgtgtatgacaggtgggaccaggtattaatattatagtatataactattgtataaatgagttattagattgactatagatgaattagagttagtagttggctatactattaaacttgctctaagagcacccgcaatgttaaagtaaggtgctatctataaaacatgtatctctcagcaatagactagattaatagtaaaccatctcaatagtatgtctacatgggtatctatagctctctaatacattgtctcgtttttctctgtatactatctccaggttagtagatagctttgttctctctcttcatttaatctctttcaagtaggaaaatatgttgatatggatctcttagagcctgtagataactatctctcttcatttaatctctttcaagtaggaaaatatgttgatatggatctcttagagcctatagataactattgtggatgccctaatcagtctccgctcactttcagatttttctgacagctgcacgaacaccttttcacccgtttaccgtgccactgcagaggttgaatgattgcatcacttcttttttttactgtgtgcaagtagctattctccaagacgtacgctagcgatatggtggttagtactcgtagtttaatcctttgatcgagttggcaccacgagtgcagagagtacttaagcgggatctttgcaaactctagtttattgcgcctttttttctccactccccaaaggcacataatcgtatccaccaacttggtactagaactctcgtctttttcatccttcctactagtagtactattttcaattctacgtgcaggccagagcactcgattcgttgatcacgcacgcgcgacaagcctcgacagtcgacaagtgcaccggcacacggtcgtacgatttccagtatgtctctctctgtatcttctcgcatctaggagtagagctctaggccgtcgtaggatcgcgtagaacatgggctgctttggcatcaacgtgaccatgaggcccaagagcgctggcacggacgaagttaccagccaccacgtcgttttctctcctctgttcctttgcgcgcgcgtgcgggagcgcgtgcaggctcgtgtaccgtgcggattccgtcgccaagaggtttggtacatgacacgctggggcgtgtgtttggttggcatgttctcaaacccgcattgctgcttgagcgcaagcgccaaagtgtacacgcttgttctgttcgcgtacgctgcaatatccgtctctcggagaggaggcccagatattgtcttctctctcacttctcgattacaaggcccatccaaagatggatggcccaagaaaatattacgccttgccaactgaaaagcccataagagtttcaaaagaagcccatgagaacaaggtccgccagtcaatccacgtaccagttggctcgcggtgtctgttactctcgtttcacactggcccgcaatgcacactaccaatgaaccaagagcggaccaatacatgaggcacatgattgagaagatctagtagaaaatgtgatcacaatgcagtgtaccccagtagagtagtacagtacaactgtacaaggcaacaatatattctgggcagaaatcattaataccaaggcagaatgcccagcccaaaaccaatacaagagtgccaataataattaaacaaactcaacatctagtacttgactatagcaaactgaagcccgtaccccacacgaaacacaaacttcgatcactgatcgggcttcgctgaccaggccttgaccaatcttgacacgaacttaacaaagctgcagtgcagaaaaagcaccaaactaacacacgccaaacacttccaaattccaaccatggcctggtctcacacacgccccaattaagcgctgctcttgtgctcgccggtggcggcggcggcggtcttgtcttcctcgccggagcccttgtggtaaccgggcagtttctccatgatcttgcccagtatacccttcttctccttcccatccgggctgctcacttcctctgtagccggcggtgggtgtgctggcgccggagtagtggcaggagcagccggtgaggcggccggcggcggcacagcagttgcgtcttccggcttcttgtggccgccgggcagcttctccttgatcttgtcgaggaagcccttcttctcctcctcgggtgcacgtggcagggtcgcctccgtcttggcgtgatcaccctcgatcttctccacggggacggcggtgtcgtggtggtgatcgccgtgagtcaccacgggagcaggagctggcgtgggcgcggccgtcaccacggatgcaggcggagccggcgcggggaagcccgtcgccgcgggcggaggagcatgctcaccggcatggtccttgtggccgggcagcttctccttgatcttctccttgagccccttcttcttcttcctcttgaccacctcgccgttgtcatcgatcacctcctcttcctcatcactcgactgttgcacacaacgattaaaggtcatgaaaccttctataattactaaaaagtctgtaactaattaaagctagatcatgcatgtgtgcacttaccgagctggagctggagctggatcggtgcagcttggagaggaggctctccttcttctcgccctcggcgtggtgctcctccttctttggctcttccacggagaccttctccatgccggtgacaagctcctcctcatgcttcttctcctccggctgatcgtccttcttcctgccaaggaggttgtcgaagaggcccctgtccttcacctccacctgctctgcagcctcgccaccctggtggctctccgtgttcctctcatcctccatgatcgatcgatggattcagctaaagcctctcgagaactaaagtaatcaaacaacagatcagcaagaactattcgctcttgacttgtttgagctgtgacgagtcgcttttgctttcggatgaagaaggtggcgaggcagatgccctccttatatagcggaggggatcgaaaggtgcggcgtttgtatcgtacgtacgcgtaggcgacgcgaggacaagaagcgtgggcgggaaatggcgacgagatggggggcaggcagaggcaggcagcgggtgagccagtggcgccgcgacgcgtgtcggcaatcgcgtggggcggccggctggttccgacgtggcggtgcctcgggacgggtggacgcatcgggagaggtcggcgccatgtggagccagacggccgtgtcaccgagggagaggaggcgtgggcggcgcgtccgcctctccgctccctctgcttcgaggcctcgacgcctacgcgacgagacacttggcttcgggcgtcgctgtccgtcaatttcctaatcgatttttggttaagtgatgagcggagcgatccatttaggaacagtaacgtaagcgtttcttgttcggatacgattcgtcttagtgcgcagcagtagcgatagattaacatcagtttttttccatcggattctcatccctttttcctctttatcggcatcatcgcggccaatttttcttctctcccagcagaggaaggaagagtctgtgatcgcttttgtgacgagttgggagcgggacacggctcgagagcgacggcaccgcgcgcgcggtgtctgattaggacgacgggagagatccagagacctggacggtgacatatggggtccgtagatcagggtcccactgatccgtctttcacagcctaacaaatcgggtcttggtttggttggtggatttggtcggacgggataagttatccctgttgatcacactgattaatttgccacccccagatcgagtcgtccggggcttctctaatttccagccagttcttttccttttatttttctttctttccttcgctttgatgatagctgatgatagctttcgtggggggaaatgtcggtggcatgtcggccttttgatttctttcgcccgtcctgtcctgcgaaacgcattggggccacactctagtctgtagtacgggtttagctcgagtcattattgactttcggtacacaagatgccgcccctaaccataagggcaaggtaatttggcgccgcgaaatcgtgacggccacgaagaactctctatggatccgttcttttccagcactgttctgacgtggaacggttgcgaaatcaaggaggacgacgtgttccaaccgttgcatctggtgtaccacgacgagcctctggcctcgcctcgtcgtggggactcgggcgagcctgcggataaactagtcggcgacatcggatcctgcccgatgtgcccgcgtcccacgtacggggggagcctggatgggcggcaggggcttcggcttttgtaccagcaagaggacacgggcgccaggaatcgattcagccgggaggcacgcgaggggcgcatcacttgatgccaggccacatgcccgcacagcgcaaatctgtactcgcctcgctacgagcttcagttcgggctcgtcccccggcgcacgaacctgtactaacctcgtagaagtacgttttgccgacttcgtgggggctaggggtagcaatttccccagtgggaccggggacccggcggggacccgcccctacaggggtgggggcgggtggaaattctaacccgcgggtgcggcagggcgggcccccgctaattttcgggggcgggggcggggactaaaaattacccgcggattacctgtgggccccgaagtatacaatacatagaaggtggcccattaaaaaaataatctgttactagcctgtttagttccgtgtacaccaagcccattataaagaaggccacatctagctcagttggtagcccaatttaatggatgtgtacaacaaagaaaaccctagatgaagtcacgactcatgagcagccgatgttttgatcgatccccaaattagctatctcaacgagaggtcgtgcgccgccagccgccaatgtcggcaccagggggaggtcacgcgccgccaaccacttcgcccctcgctccacgacccttttcacaggctcaacactagcagcagccgccatcgccgctaagccgccatgtcgcctcgctgctgcgtcgtttgcgtcatgccgtcttgtatcctcgtcgatcctcgcccaggcgttgccctgcagcgactcgacggcagctgttaccgtcccatccatcgtcgccacaagcaagtgtcggcggcctgcctccgcctccccaagccgacaccatcccagccacaaccgctcccaatcggtgttgcatcgtcgtcgtcctagctggcaccggccgctagccccgccatcgccgcccctagccagcactacattgttgttgtcgtccctagccagcgtcggcggccagccccaaccgtcgctccgtcgtcaccgccaacatctatccctgcccgggtgcttcgagtctccgctcacccggcgggtccccagcggggctggggaagggtggggttttccaccgtctagcaatgcggggctggggcgggggataaatgcagagagcgggggccgatcaatcacctgttgctagctcctgctcaaaatacggagtgcaccaccggcagattggccgcagcaacacgaatgccacgggaagaagtattgacgaggtaggccgaaacaagtggttaggatttcaattccaaaagaaataagtttattttccctccctccctcccaaaaagaaataaaatcgacactagccaccaccctactcacgctgtcgctctccacctaccatgtcttctaggcgtcgactacctgttctccctctttcctcctgccgtcctgcgagcgccggccaagccacggccgccacctacccgtgatcttcaagggaaacgaggaatcctcatcgaggatggagacggggtggcatagagccccaggaagacggataaagaggggccacattcccactctgctgcaatggcaacgaaatcagcaagaagccctcctccgaaggtggcactcctccactgcgagccgaagccaaagccaccacctcccaatctacacgcgaagggcccgaaggcagatccagcttcaccgtcacaccctccctgccatggccctccttgtcacgtgtggaactcatcgttggtgccttcccatctcgtccgaactgcgacagatggctattgtggccggcatcctccccatcccatgccacctcgtgatgtctaggctagtggtcggcaggagaggagcaaggcagcgatgacaatttctagagtagctcccggttgatcctaccccagctcccctacgagctcgctgatgtcggccactgtctaccttcctagagacctcagcggcagtggaggtcgatgggtccagcacggggagctatgtggacaccatccaccgccgatcgacctatccaagaaccgccttgccggccgcatcctcgacaaggtgttcgcgatgtagaaactcaacaagccgcttgtgcttgggaacacgctcttcgggacactcctttccaagtttcatcgactacgcatcactgatctgactccggtttggcgagaatcataaatagagataaagggtaaagagggggggtggggcgttattttttttctcactgacatgtgggatttatgagcaccatgtatgacgaaactgctatcaaaatggccaaggaagtcgatttgctctggttttttaagatcgggaatgcattgtactcgatattgcggttgagggagacaattcatcagcggcaagtgttgagggaggtaagacagacttattacttcgagaaatgcccttaggcttgtttagtatggtccaattgctggcccattcaggccttgtgcagacctatgggtaaacaggtcttgatctgggcattatcctcttgtgtcatcccgtacatgttaaaaaaaaggaaagaggggcatctgaacagtgtttcatccaaaattgtcccttacgcatttcctttcaaaaatcacgctccgatctataaaaaaagaaaaccacttttataatcttatcctcggtcctaaaatataagtagcttcaaagaaatatgagagaggagagaggaagatgacagagagaaagaagagtagggggttacatgagaaagaagaccatatgccctccacccctgccaagttcgtccagcattttttttccgttgacacgtggccactctattcgagatatcacaaaataaaaaaaaataaaaataaaaagaggctgtatatatctggttggatgtacaggctgggtaaaaattactcttctctaaaattaaaaaaaagagctatggtcgataagcatgtaaaaaattaaataaagcaataaaaaaattataataaatctttcacatatgtaatattaccgatttaaaagctaatgttagagaataggttatgaaaagtaactccaagatcaacttaaattaagtcttataatttaaaattcgactatgatttagagtactatttgatcactagcaagctctctctcgctccttttgtcttttttttatttaattcagttaactatatttgagatgctcatagcaggtgttctgaacttcattacacgttttttttatctgaagggcaggtttctcctaacaaatgactccttataaactctagttattttttttaacaaatactccatccgcttcttaatagatgacgatgatcaaacattattttaaaagtaaacaccatcatttattaaaaaatagagataatacttcttttagtgaaagtctggtgctctctactagtagtattatacaaacagtagaaatgatctgcaccgttatttcattagggtatgataagtacttttctatcattgaggtggccgctgacatgtggggtccacgtgagtcccacttatcacgtaaaccaaaaccagacactatactaacaagagattaaagttaacatggcactattagttacgggatggactatacctggtatttcgtgtgagagataaatttaaatttcagactcggcaacatattgaaagacctaaagtgaaattattctttcaataattagccattgatgcttgctcccccgggccgcgtgcagcccacaggtacacgtatagcccatttatgtatctacatttagcccgtttaaaaccgaggccattgccttttagccaaataaataatatgatggacaaaaaaatatagaaaaactttagacataaacactttatatgtaaaaaatacatttcatatagaaaaaatattgtacaaactttctgtgcacaatttttctacttacatataaaagttttgtatacgtgcaaaaatattctgtatattatttgaatttgtgtacaaactttacactggtggagaagtgctttttactaccggtttataaccctttgtagtcccggttttagtcctgggtgaaataaccggtagtaaaaatccatttttagtcccggttggtgttatcaaccgggactaaagatagagctaagctagctagatccggttactccattattctattctcttcttcattgtttttaatatattgatttcactccatccccatcccaaaatcccaaatcaatcatccccaaatccttgaatcctcaaatcgatcatatccaaatacatcacaaaatcttaaaaaaaaattacatcacaacttcgacaaaattcatcacaaatacatcacatattcacatcacacacaaatcaaatacatctcagatccgaatcacaaattctcaaaaaaaaaaagaaacgctcgctgccgctgctgcgctgcccgccgcgaggccgcccgccggagcatcgaccaccgccacgctgccgcgaggccgaccggccctctgcccgctggcgcgccgccgcaaagccgccggctgcccggccctccgtgctgcccgggcctccgcgctgcagatcaagaagtggggaggatgggagggaaaggaggagaggcgctgacgggcctctgcgttgcagatcaagaagtggggaggattggggagggaaaggaggagaggaagagataaggtgtacgtaaggagctagttagaggataggaggagccgggagtttaagggagagaaaggaggagaggaagagataaggtgtaaagagttagataggaggagccgggagttaaaggagagaggagcgggagggaggaggagacctcgatcctatccgcgcgcacgcctccctgtgcatatcgatcttttttcccggttagtgttaccaaccgggactacaaatagatctttagtctcggttggtaatactaaccgggactaaagaccaaaaagtacctttgagcttttaaaccgggactaaatagtcccggtttttaatacaaccgggactattgtgaaatctggccgaccgaccaaagatgatttctttaccagtgttatgtccaagcatacctttttcatgagcttcacccaaaaatggccttagagaatcggctcgttggttaatgtaaagtacatgactacattttcactcggaatagctctatttttttccctcatttttgttgttgattaaatcttctctctcaatcatacaatcgaatataatacatccctgtcttcaaaaactggtgcaaactgattggattgggaagtactttttgctgaagtaacaaactaaccgtgattgacccattgagtcaacatggggcaggtgtctagcttggatttgccgctcttagaaaaatataaaaaccgtagcgtcggttgaggaggagctctagcaggtgctagtcatggtcatccatcagcaccttagcgccgaaagagaggcagtagatgatgagctaagggacccaaggtctagtggcggtggcgatggtgagggtagtcagaggaggacgtaggctctagaggttgctctgcccaagccacgacggaggagagtgagttggctgctatgaggagtgaggcgtcgacgagattaatcagagtggggtgtgtggctctagaagtttcgctcgagccacgacgaaggaacacaagtaggccaccgccgaggagtgaggcggtggcaacttgagtactcgatgagtgggccccgagcacaagctcaaccattgtgctagatttggaaggagggaataacaagcggaggagaaactcgctgccgtcgagaagaaatattttgggtggtggccgtcgggttgcgttagcgttagggcccacccacacgatctgagccctgccgccctccgccaccattgatctcacccacccatcgatggtaggcaagatgcgacaagcgcgcagctatgcccgttggtgatgaagggaaacgatatgggctgagtcggtgcagagacggcctcaaggttgccgagaggcactgtgatggcccagaataattagagggaaaatagaaggaaaaaaatccactttgactctcttaattgtacgccgaatctaattcgtacccctcaactagaaaaccggataggacgactcccaaactattgaaaccagtgcaatttgacttcctcagcagttttggagggtagttttgctgatgtgtcgctgacgtggcagtgttgacccggtcttcgtcccacgtggcgcttacgtggcattagaatttaaaaaatatatgtgggacccatctatcattcacacacaaatatatattgtggggcccgacgtcgacggcggtggccttggcgagcatggagatggagcagctcatagcccgcttcaacgatgccgtcgctgtgcatagcaacaactagctgctgctggacgccgccgccacggcgccacacgcggcggtgggcatggagatgacggcgccggggcgcggtgatgatttggaggagctcatcgcccggctcgtcaacgtcaccgttgctgcgctgatgatttggcggcgctgttccactactgcggctcggcggtcgccgcgtgtggcatggcggggtaggcattccggctggtgcggtatcacccagtttttttaatgacaaataggtcccatggattttttttaattctaatgccacgtaggcgccacgtgggacgaagaccgggtcaacaccgccacatcagcactacatcagcaaaaccgtcctccaaaaccgccgagggagttaaattgcactgttttcaatagttcagtgagtcgtcctatccggttttctggttgaggggtacgaattagattcggcgtacaattaagggagtcaaagtggactttttctaaaatagaaaaacgagaaagaaataaagaaatgagcagagcaagaagcaaagtagagcagccgctgcctgccatactggggcttggcccattctcgaaaagtactccagctagcagctagctgcttgggctttgccggctaggagagcaattcaagtggtagtagcgcagcgagctgcagtagctggccttgggccatttagccactagcagcggtgctaggcagcaacagcagcaaggcagcagagcaaagtaagcagccgggcagcagcaaaagctcagtttcagttacttcagtagcacctcgcttgccaagagttaatggcaccaacttataaagatgagaaaattcatgaaatatcatcgacaagcattttaattctagaaatagcatcgacaaacataactttttaaaaataccatcgtacaaacctatttctcctagaaataccatcacagtcaacataccgtttagtccacactattagaatttttttttacaataataaccaaattgctctcactccaaattattctatcccaatccaccggtaaaggaaaaaaattatgaaaagataaaaacctaaacctaacccgatttaactctcttgatgggcgacgacggcgaggctgcgacgcggggttcccaggtggcggcgtggggctcccaggcagtggcgcgtcggccgcaggcgtccgcccgacggtcccaggcgtcggcgtgacgggctgcgaggaggtggcaggcaacgacacaggggcattatgaaataatttgattgatagcaaaataatgatgtccgtgaatttggaagctaacataaatatggatcaatgcaaaataatattgtgtgagcaaacaatacaaaatgatattgtgtgagcaaatggttgtctggagggtaagaatgtcttttcatacaacttaacgaagagttgttaacaaccgtttgactattatggtatttctgggagaaataggcttgtacgatgacatttttaggaagttgcgcttgtcgatggtatttcatggattttctctatacatatggatacccgataacctgaaactctggttcaatttttttacgtgaaccgaagaaagggttgacctatgatggtgtggaggaagaccatggaagggtgtcaagccttgagtttttcacagcgcatcaccgagcaccgtctcacctccttctccacacgtgcctacaatcttcgcttccgcctccactttgcttccaagtcttctttgagagaggaggtaaaagagaccgaggaagggatgaagcgtgatatgtgggtctcacatagtcacataagttgttttagttttttttttcaaactggtactgacaggtggctcccattaatattattatcattatttttgcgtctagtgccacataagcgttatccaaaccactttaatttagaggtaaattgacttggttttaagagtttttttaggagcacatagaaataaaagttatttacatgccaactgaaagggaaaaaaagagaaaggagacagggaacggaaaggagtaaaacatctaaagcctatcttgccacaacatttgacgaccacatactcttagctactgaaagggtcaattagccctttactgaaagggtcaattaggcctagagggggggtgaataggctaatttaaaaacttaaatgaagcggaagcaggaattttcggaactaggctggaattttcggaacttccgaaaatgcacagagcagcgaacacaggataaaaactctagatctagaagtctataacagggcaaacaaggcacaaacggcaactagaccaatagcggcacaagcaagcaaagctagaggagagggatgaagaaatatcaccaagatatagctcacaaagttgatcccgatgttcaaatccttgaggggattctactatccgttgaggagctcactaagagctgggtcttagctaaccctttcctcgataggttgcactaagcactcctccttccactaagaggtatctcttcccttgcgaagatgagatctggccttcacaaacttctcccggccaatcacaagtagatcggtggctcaggaacgactcctagccgtctaggagtcctcaacctccaagagtaaaagatgatgctaagaactcccggagatgatgcaagtgctcacaaatcttcatgaagagcacaagaagcacccacacaaactcaaatccacactcacacacacaccaaatccgaatctaacctgggtggagagacgaatcgagaaagcaaggctcaaaagactttgagagagaagcaagccaaggacacacaagattggaaatggaaccagcagccctcacaagtgaggggaggtgggtatttatacccacagcacaaatctgcccgttggagtgcaacaaaagagattttcggaacttccgaaaattccagatctgagaaaaatcgaagtcaacgcccattttaggaacttctgaaaattcttttcggatacttccgaaaatattcagaacccaaaataccttatgtggattttcggaacttccgaaaaatattttcggaaacttccgaaaatttccagaagcatatttggctcgcagacattttcggaacttccgaaaatttccataaggttcaaatcggttctgtgtattttcggaacttccgaaaatttccagaacacaccaataagagaaatgctttcaagaaaaatggattttgagcacacgcatcactccttatatgtctatgcatcatcccccataatagtacggctttcctacgacacaatgcaaggtaaaagatacaatataccatttgaacattgccgcattgcatcatgatgtagcattcacggggtatgcattgcattacaacatgtcgaggacatatcaaccttcacatttgcttgaataaaaatgttagtcctctctaatcgcattgtaatcaattatcaacatcattagaggcctagatgcactttcagctgctaaactccttgcgcgcagcaccaactcattggccaagcgccaaagtgccacattggcagtcatagttttcgccacctcatgccaaatttctgttgttggttgaacaccaaaattttcctttccttccagatcgtccatgctagaagagctgcaatggtgtcaaatcctcgtcgatgaaccttctcaacattcttccagatattacaaagccagaggtgaaaggagtcctcattcatcggcatgcagctcggttgcttgattgccatgaggaccaaggccgacgagattcacctaattttaagatcgaggaagcctttatatctgattttatgattgatttgagggacgcaaatcaaacccgacccacggttgaggggacttgttccttctcacgtaaaatatgtgtgcctatatgggccgagatcccgttgttggcttgttgccttgtgtgctgctcttgtactccctccgtcgcaggatataaagaatttttgagttggacacgattattaagaaagtaggtagaattaactagtaaaatgtatgtgggaaaagtgaatggtggtgggttgtgattggttgggaatggaatgttgatagagaagttgttatattttgggacggaggaagtagcattttgtcatacataaggggatctgtggctgtggattggtttttctgaaagaagcatgagatctgccatttccatgagatcacaccaaactttcccccccccccccccccaactcccaactttccatcacatcacattatatccaaaactttcctacacataaactcccaacttttttttaaactaccaactttttccaaacttcttctcaatttcaggaactaaacacagcctaagtaggaaagaaaacaatatttggtggaaacaataaagcatggaaaggtcttttaaggcctccagttcttcatcgtgagaccaggacgtgcagcgtggggaagctattacagagatctaataaaggcaagttgctgtggattgtgggggatgcttccctgattagtaatagttccaccatttttttcaaattaggtataattgattcctagtgagctggttttgtatagaagctttggtgggaaacccgaaaccgtctctacttgtgtcgaaaatgtacattggagacttggagttgtggcaataattttactcgtggtatttgacgtctggtgctgtcaggcacgtatgcaattctaactagtgctgtgtattagtgttctagatgtttttgtcaggtacctcattggccataatgttctttgcttttgctgagcttatatatcaccgtctgcctgcgttaaattttggtctgatgttaccggtgattaactggttgtcgcttggtagtcacagcaagtacctgcaagttaaacctacacaagtacaggacacaccggcctggagtggagtaggttgcagtttatgatccagcaaaagaagttacgggccggcttacggcacagtttgggtcggcataagatcatttattttgccatttctccctccggttccaatttctgttttgtcccctctgataaaaggagaagatatcagctccatgatgtaccgttctcttcacctagtagcaaaagataagcttaacaactcaggtgtggattacatacgttcacctagatcatattgcccgagtaaaagactcaagcatgacatatcagataacatgaggaatacaacttgccaacagagcagaacaggctgcttctagaaccaatcaaaagagatggtatggtactggagttcatcgacatgaagcagcattgtagggtttggacacttttgtttcagatgaaaacattaaacatacatttaagaaggtggcatcaaagggcacaccagtcgtatcttttttacacttctatgctgaaagctgtgagggtacaacagcagtcaaatctcctttttctcttttctttttcgcaggcaattcttttgcttttgcacttgcagttttggtcatgatcaggttccactccaccaggtaatggggcacaccgcatagctcaaggtctatacctaactaatgaacagtacggtgcttcataaattatttttcagtaaacattagtacaatgagcatggtcattagaaactctgacctgatccattcaaccgttttactaaaacaccaaaagaaaaagacggtatcaattagtttacttggactacttccatccacccaatgttcatagttagataattcagagatgacatcatatcagttgtatgatgaaagctgcgaggatattctgatattctaattctgaaggcatgcatgcatgtcaaacagatcaacctagcaagcatcaattagttcttttttgacaacaagcgacacattcatgtcacgcatataaacaacatatttatttttgtctaatatgctagtgcttctacagttctacccactagtcctgatcaattccatgactttcaattagaccacttggagaaagcatatacttttgtgaggtcgagagaagcaggctcgccacaaaagtcctggccacaacaaactccctcctaaatcaattggctcctaaatcaattggtaaaaaagaatcaaaatcaactatactacttaaatgcgccatgtttgcaggcgcaagcgggaacgggccaaatcagctcctcccttttgattcggagaatttcttggtagagatcgaccaactggtcatataaatcaatcacggtcacttaacacacaccgttccttttcagcttgcaaatctgaagtatggttgcccacctaaaaattcagtcagtattttgagacctagccttccacgatcgatctgcacgagtgtctgtttgtctctctactaaaatccacagtggaattaatatttctacacctcgcttgtctggttgagctaggtagctagctagtccaatatgattccaaaatgaagttgtactggttggctaccattgaatatttgactagatttatacagtagagtagtgtactactgatcaaattgggggctcccttggatgtcgatagcaacattagaactttagcccgcgtggcatcatatcaacaaagttggtacaccgtgccgtgcctacttatctaaaatggcatcacgtgttaattgtcttgaacagcaaccattgaaccatgccgaacccatgccaggttttctttctcgatgtactttttgacaagaaaccttcagctttgtcactattaagcatgcatgagcgagagcttggtgccaacttctagcagcttgtgagatgtgtcatgctgtccatgtgccccaatccatgcagcacgaatgcacgatcgatcgagcatgagggatgcatggcagtttctctcgttcgaagcatctagctatatccgtgtgaaggttccatgcatagccattctaacgacacgtgaaaaggcaagctgatgcactgaacgtagccagaggcggctgaggttgattttgactactggactggactaactcccctgatagagaggtcttgttgttgatagggttccagtctgaatcgtcgttggagtgaccgcacctaaaattcagtcgaaggatgaagacactgcgctatggtctcaagtgtcggctagacacactgcactggcatgtatttctacctaaatttatcgttcttaagaaaatatctcgagatatgtaaattttacactgaaatttttgatgcatgtatacataaaaaattataatatcttctactataatatattctcaaggtctcaaggataataaaatttcccttttctgccccacagttgttttttctccgactagcacagtcatgagtagtcgcttactcggttacaagttgtaattaaccacgtgatgagttagagtgaaatatctctcccgtgtttgatagtatagattaatctgtgttatccacatacgtaacgcaactactactacttcctgttttattattgcaacgcaactgctccactaccagtgaagtagtgtattcacttcgattactgacatgctccaccgtacatcagtgcattcacctctgtcattagctcattgtggcatcttgggtaacgccgaaagtagtggtactttggatcgtgaccaagtatcatcttttgacgaacttgaagttttggtgatggtacaacagcaattttccccctcttctgtgaaatatggaaatggtatgtgttccgttcaccacaactgttctggaagaaaaggcaccagtagtccagtacaacggtagatgcgaatcgacgaatcattcttctccatcagatttcatccaaaggcagggggtttatgatatctatctccaggccccatctgctccgcccgtcacggaacgcgaaaaagtttaaagcaccaaacccaacacaagtacactagctgcccaaagcacccccaaaagcacaaggattaaaatcagacaaaagctatgcgtgccaagcacgaccttgcgtcacggtggaatcgaatagaaccggtccagaaacccacaccattcttgggttctctccccacaacttgtggtcgcggtctactaccgtctactacgtactctcgcgcggccgtgcgccgtgacgacccatgaggccatgaccgcttccgccgcccacgccttcctcgagcgttccacgcttccaccccgaatcccacttcccccctcccatttaaaacgcgcccccctccccttcgccatccgcgcacaggttgcacaggttacccttcgcttgatcgatcccatcaaagagtgacggaggtggtggagtatggtggtcggcttccgccgcacgatctcgttccccgcgcccaaggcggcgacggccgcgaagggtgaggcctaccgcgtccggtcggcgagcctgccgtgccggttccatcctctggtggtccagcttgacgaggatgtggcgacgatgagggagctggtgggccgcctggcgtcggccgcgtcggcgggctccgtcgcgggggccgcggagcagctcgggcgggtgctggtgtcgctctccgagctgctccaccacccgcaggcgcaggagccgctccggcggctcgggcggtcgccgttcgcggagcgcctgctcgacaatttcctccgcctcgccgacgcgcacggcagcttcagggcggcgctcgtcgcgctctccgcgctccaggccgaggcccgcgccgcgctgcggcgcgaggacccggcgcgcctggcgtccgcggcccgcgcgctgcgccggtccgggcgagacctcccgcggatcgcctcctcggcgcgcgccgtggcggccaagccgccgcctccccctcccgcgggcctcccggccgacgggaccgccctcgccgccgccatcgccgacgcgaccgcggccgtcgcctcggcctcggccgcggtcttctccggcgtgtcgtccctctccatcgccgccgccacggcccgtgtcgaggtcgccgccacgccctgctggatgccctccccggcgagattcaccacaccatcggcgacgccaagacaccacatcatcaccaccaagccatcgtcgctgcgcatatggtgggtcgccgacctgatgcgctggatgtcgcgggcgaagcgccggtcagccagtaagcagcacgccgacagtgacgcctcctcctcctccacctcctccgccgccacggcgcggccccaacccaacgtcgccgtggacccggacgagagagaacggaaggcggcgttcgagcgcctggacaacctgggacggtgcatcgcggacgtggagagcatcggcgagaaggtgttccgcgctctggtgaacaccagagtctcactgctcaacattctgagcacaagcttctgatgaattcccaaccaaacatcactagaaacgcaaactcgatcgaattttgctactttgaaagacatctgtacataaaaatggggcctttttttaggcttttgataatcatagtactggcatgtttagagagctccatttcctttgtttcatcatcatcatcatcgtactactagcatactgctagtattcacatgggagccaaagcattagcttcaggataaagaatcaaagatcgttcagatactaacaaagagtggatctttttggtatactgctcaatcaccggtgattttcatactgttctacctgcgaaggatacggctgccgttatagtcgtcgctggctagctgttgcgcggttgaggcggctggctcccgatcgttggttgggttgggtcaggtcacgtggagtcgctgtagagccgtagaggtggagggatcgtggatttcgtggtggatgagatgagatcgggagacggggatctgcacttctgcaggcttttttccagcgcgatcggcaggggcggagcccgtgcgaggacgctcggtcgatcgatcgatgcttccgccaatcacgccgatcgggtgatctccgatggggctatggtgtgttgcggttgtttgtggcgtggccgtttttcgacgggttgcaaagtgtgtgttgttgcgtcggtgagagaagtttcgactccgcactccatttttccacggtgcagccgttgcagcacatactatccttttgacatgcaggggatggcgttctatgagataaaaccacgtgtgcaaaagggagcgttgagagttcattcctcatgtggtcgctctcgaggtagattgggcatgacatcagagctattgtgatcggtccagagcaagttttggtttgaggaatcttttgacttaggatcggcatatcttcgtttgcttctctaatcgatcacacgaccacctaacctgtgtgccagtgtcaggcaggtagaggactactggttttatctccttggcttcgaaatgcaatcgggacgtatagagctgcttgatctgacatccacaattattgacgcctgttcactttgatatcattttcaaccttatcaaattttggtaaagttacaaaaaaaagtggctacatttagtttcttgccaaattttggtaactatataagaaatcctgccaaatgctaaaatttagtaaggtttttttggcatcaaagtaaacatgtccttggtttgttggttgcaacgaaaaaggatccgaaaaatcatatatcgttgaattgatcagcgttagacggtgagaagcctgactaaggcccagtttagttacaaagtttttttttctaaactttcaacttttcatcacatcgaacctttaatacacacaacttttctatcacatcgtatcaatttcaaccaaactttcaaacttcagtgtgaactcaacacaacctaagaaaaaaaccccagcattgcatgtagcatgcgtatgtactacaactactaccctactactatgtcatcccctctatccttagaatcatgacttcagcttagaggtgccgtcaattatggtcgaaatgggcggtgctggtcctaccactcagacttgtttcattgacaactttcgtcatattgcattttaatacattctataaaatttacaaaaatttgtgatcaaaggagtatttgggagatgctattgaagggagtagttgtcatggccagatcacacgcatgtgttcgtatcccagctcctgctatttctacctcatttgatccattccatacctggccacctggggcatgcttaactggtgatgactcgaaacttggcaagcaaaagggccttgtccaactttgatgaacgcacgtacgctccacggctcgacagctgcaagccttgcaactcgcccccgattccgtgggacttgcttgccacggacgcgcgcggagaacgagaagccacggctactagccgcgcggcgcacggctcggcacggcgaacgagcgcgcccgtgcgctcggctggatcggattccgttccgtatggcaaatcctttgggtttccagtttccacgctttgcgtttgcgaacccgaagttcctggatccccggacgtggccatgtacggtatcgagttcgatcgcttgcagtcgcggtctgcttcgacgcgctttcgcgcggagcgagggccgcgaccgtgcggattcgagatctcgcgaccttctggaggtccaagcccgggagtccccgtggcgcttattttaggcggaaggaagctgccaagctgccacgcggtggtggcgctggaatacgaccacgcgagcgtgcagaaggagcgctggttggctgggtgcccgacaggatgcgtgccccctgttcccctggccgcggactacggtgactctctccagcgcaaagccgttgccttctcgtttcctaggaacagtgcagtcgacggctgtaccttggttgtccacaggctgcttccacagtgtgtcacagcttgtttattacaccagctgcttgtatattttacttgtccgtgctcgccaaggccatattccatatttgtatggactctggaggaatgcgcagctatttcgagctgggagcatgggtagtaaacagtgttatttgaaggtcaggtgatgacgtcgccttcctacggcaaatgcggcacctacggcgaccgcctactgtttagatagttgcgtcccttatctcttaatacttggctgcattgggatgcaaaattcttttaaggctatcttccaacggagcaagtttaataataaaactaagtattagagcacccacaatagtaaagcaagatgctctctataaaacatgtacatctcagcaatatgctagattaatagtaaatcacctcaatagtatgtctatatggatatctatagctctctaatccattgcctcgtttttctctatagactatctccaggttagtagatagctttactctctctctctctcttcatttaatctcttccatgtagaaaaatatgctgatatggatctcttgtagatagcctatagataaccattgcggttgcccttagcaagctcaaactaaaactaatatgatggtatgttagtttgtgtggaaagagaggaatgctaggatctttgagcaaaagtcacgctcagagatttatagagaaattagagatgagatttggtgtggagggaggccggtatttttagagaagttggctgagaacctccctgtcagccggccctatttgtttttcgttttattttctctacccccaaccccccacccccctacagtttaatgtcaattttgtaaaatttgtaacaattcctttcagccttaataaaattaggttggccatcccggcaaaaaactaaagctaacatgtatagcatactccctccatctacttttgatagtcatatttctaaatctgaaaaaaatatttttgataggcatatttcaattcaacaatctatcatcttaatgactttcttggttgtaatgcatgactcttcattcttccacacaagattggctatatgggcatcgagaaatgtaaatattaatgaatcgcttgtttacgaggaatgactggtaacatgtttaaatggatgataagtagaattacttatccttggtctgtgtgccaagataaaatacgactatcaaaagtagatagagggagtattagttactataaggttgtctctattttttttccctatctctttgtcttactcttacttattatataagtagtgcatttactgctagtacgagaactaacattgtttctccctttctttcacaaaagtttgtggttggttatatcctattattaaacttgctcagtgagagattgatacaacaatatccgcaaccccatcaggacatctctgaactctcaactgaaccgaaacaatgaatgtaaacaaggcaagactaggcattatgaatgtaacctccgattaatcaacagcaagttaatttcagacatgcataatagacagcatccgacagcagcgaatcatctccgcgcagcgcaagaagttactcctatacacatcacaaaacgagcatactgttgctgggtgggtcaggatgcgggaacaacagtaacactacagaatctttgcatagaaagttctcaaaaaaaatatttacatagaagatgcagttattgggtcacaccaatgcatgttgctcgccctggggactgatctggaccttttgaagcagtccgtctcttggatggtcaaaactgatcagtcaccggccaggttgactccataacggcgagagaggttcttgatatcattcatcacgtcactgtctagtatgcagtacttcttgtaaattccatcaagtaactcctgttgctgctttgctaggtccttgtcctcttccaatagattctggggaagggaacagccaaatgaaaatattttctcacatgctatctgaagatcaaagcatcgtcaacgcattatatatatgtaatttaacagcatcaagatatcaaaatactgtcctcaaactatcaaactagtgcaaacacaatgcttagacaacaccaatctggaatggccatgaaagttcctcaagcatatttacaattctagtaaggatgaacgcgggtcacttggtgtgtactcaaggagtaatccatgcccatccctaagatctaattggtccttagtcatgataaaggcagatcaaccattacaaaaatacatgtaggcattgattgattctccagaaagaaacatcctccataattagataattatattcatatgcgcaaaattctattcaggttgacattttctaggttccaattgtctatgcgctatcaaggagcctgcccccagttcccttgagcattcttctgagtgaattctgagctattgttctaccaacagtttcatagggagttaagcagaaaagtttgctgtttcatggtagtggacataaagcacaatacataagtcactcatccgaaaaaactcaaaagtcatccaacttacctttatgagtgccatattttctgtttcctgccttcttgcaaggagccgcagtttgttcattccttcatactctattccatcttcttgtttcacccactggaactctttcttgattccagggcgaggaggccgatccagaaacatttcatgctttgcatagatagctcttacaggccttggctttccaccgattatgaaagggaaattattcatcaagtcgatagcagccttagcttgtatttcatcatctagttccaccaacgcagcagaaggaatatcatatgggattgtgtaattaacaatgaagtccacattgacaacgcgtgcacactgggaaatagctgcttcaattactgagcttgtgacttgaggagaaaggtgatcgatatatatcgttctctttaccctctcctcaaaatcagcataccccttcttagcatcttcatcagattccatgggaaggccaaatctgtggtaaacagtaaatggaaaccgttattaagagtgccaaggtttcagtgcaaacaataagctctttttcaacttctgtttacccatgcaaaaacctcagaagaaattgatgattctattgacagggtgtcaaactgagcaatataatagatgcaagattttgtcctatcctgaacttgaaagggccatgctggaaaaaagaacttttcagcaattaagctgcagtgtcttctattcaatagagatttgcttagatgcggtgaagataagtttgtaaattattcatgaagaggctgcatgcaactcttttctgatattgttggatttagaaactccgtgaactggcaacgtacacaagcatgtggtgctccttggcaatagacacaaatcatgaatgatattacatcagagtatcagacctatatcagggacaacaaggaggattagggatcaaggacttaagaacacataacacagcgttactcttaaaactagcaaacaaggtactctcagcagaagatgatccaatggctatctggtttagagaaagatatctgcaaaacgcaatacagctaaaccccagagccagtgatacaccaacttggaaactcatccagtcgcaattccagattctaagctactcgacccaggtaaaacttggcaacggcaaaacaaccctcttttggaaagataagtggctatcccagcgcacatagagttcgctttcccagttttattctcttttgccctacacaaggattgcacggttgaatcgcaatacaggcacaattcctggcacatccagctccatccaaacctatcctaccaagcagagtcagagctgcatgaactgctgcaaatactgcaaaaccaccacccctacccagacaacacaaacgcaagagagttttcatacccggaacccaaagtctcaacagcaaatgcctatcggatgatgtccttccatgggtcactttggactccagcagattatatttggctccacaccatcccgcaaaattgcaaggttttcctctggctggcattcagagacagattaaacaccaaagccaatatggtcaacaaaaactggaacgaagaccccactgctctttgtgccctgcgctagaaacagctgaccacatcatcttaagatgcaagcaggccaatagcctttgggaaaaattgaatttactgcagctagccaacaactcagattctatctcaaccttcctccaggcaattatagcagaaatcaaactttgaaaggaattgagccaatttggtttgctgcttgcgcatatactctatggaaagcacgcaacaaccaggtgttcgaaagacaatttgacagtctacaacacattattcaacagatctcagacaccatgcacctctggagcctaaggaccaatgaaataaacagacaaaaaattcaatcctggtgctcacggctttcatagaagattgctcattgtacatatttatgtaaattctccctttttttctgttttggtctgttctgctttttgctctttttttctctctgataattcccgcacctaatatgtaatctgtaaacctcatttcttttaatgaaatgactataaggtagagcctgttctaccttcttccgtcaaaaaagacctatatcagggtagcatgcgccaaaaactaaaaacatcgcaatttcttcttctcggaaggaaaactcaccctagctcacttggtggaggtgtgggtgtacaccctaccacccaagttctacggttcggatcctcaaggcaaggcaaacttagtacttagagcataccgcaactcccaaatgacgcatacaacaacttccaaagcatgagcttttaacacgacagattaattcaccattatgtgactttctgtcatgcatatcacatgatacaatcggattaaggtgatagaggggaaaaaaaaaagaaatccaaactccgtgttttgtgggcaaccagggtcactcaagcagcactactacattgacttcacgacctaccaaaatttgccacacatgtgcgaatagagtttcacaccttccgtgggataggatgggaggaggagggaggcgaactcttcgccgatgtcgcccttgccaccgccggtgtctccaccgcctccttcctctatggcaccctacaacaatggggatcaacgctgccaaatcaggtgcttgtagacctaacggataagggagaaggagcacaggggagaaaaggaggcaccagtcgccgactcggaggggaggtcgccggtcgccgccggccggggttcccgggaagggaggaaaaggggaatgcggcgtcgtttgggttctcgtgagaagagtaagagacgctcaggattggcccaagcagaaaagcccacagaagcataccgccacaggtaacgtgtacgacttggggccagaattaggaaaaagtacaccgaaggtccctcaacttgtcagcgaaataaaaaacatcctcaaatcacaaaaccagatatgcggggtcccttaactatacaaaaccggtcgcaataggtccctcggctgataccggttttatcctatgtggcgctttgaccacggtcatcggtggctgagtcaccgtgggactcacgtgggcctcacgtgtcagcttgtccaggtcagcctactctctctttcctctcttctctccctttctcctctctctctctatctctctcactcttctctctggggttctgggcaggccagcgtcgccagccaacaggtgggaaggagagcaaggcggcggcgggggaacaaggcggcgacgacgcaggagcaagggaggggcgttggcgccgttgtcgtcgccgagcaccaccaccacctgcagggggcatggacatcgcgtcgaggatgagcagtggtgaaagggggagatggaattcgagaggcgaggggcgcgcgcgcaccgaggtggttcttccgcttcctggtctcgtgacggcgatcccccgccgcgatctcctcgatctccagccggacgctgccatcgccgtctcctgtggcctccgcgacgccgacctctgctctcggcgccgccgctcttccccgaggaggaggagcccaccgacgagaacgcactcgccttctcctgccagatctcccgcttcagtggttgcggcggcgagatcggctcctcctcctcctcttccttcctcggcggcggcgagatcggcttcacttcctcatcgacaactctaaggattcaagagcaaatgtaagaagcgtaaagaatgaggaaaaaatttggggataatttgaattcgaggtggcttctctccctacctggatttaaagaggaaagattcgaggtggctagcatctttgatggcatcgccggccgccggacctcctcctctcccacttctccccgccggcctctgtcagggagctcgacgccacgatgctcggttgaagctctctttccctctctcggcgccgtcgcacgcagggtggagctcgacgccgcgacgctcggtttgcccccgggctcaaccccatcctcatcggcgccgcaccaagtcgcgccacattgctgtcatcggccaccagacgaggagcaaagtgagagagagagaggaagggagagaagaggggaaagagattgtcctacgtggcatcctgacatgtgggacccacgtgggtcacacgctgactcagccgccacataggacaaatccgacgtcaatactgtcctgggatctcgggtgaccggttttgtatagttaagggaccccgcatatctggttttgcggttcgaggacatttttgtatctttgtgacaagttgagggaccttccgtgtactttttccccagaattagccatttcttaacatcttgggctttactatttgggcttatactattcgagcccactgcacgaagaaaaattagacctccaaaaatcccattgggttgtgactgaagaaaccttttcgtttatcttttatagagagaaactgaagaaacaagctgcagacttgcagagtctctcctccatagcgaggagcaaacacatcatgatttgctgaaaatctttccaacaccgatgtaccttgattcagaagcagtatgatttcttgggttacagcacatgcgcacagatcaattgcatttccgcaccaccatgatctaatcctaacggattagagcgctgctggtttgtagtagcttgttgcgatccattctcgcacaaacctgcactgttgcagccagctgcatgcggactcgtgagcatgcatgctactccagctctcgtagcctcacacgcacctacagtcgcatccaccacctggtgatcggaaaagccaattgtttacatcatttttctactgggccaggtgttcgcttaagcatgcagatgcagctcgtgctttcgtttgaaagaacagaatctctggaaggctggtggtcagccaccaaccggctcctccatcatgatccgcggatcagaggcaggcatggatgcgtccggttaatttttagggaggttcatgtgctaatcttggcttctggatacggcacagagctgcatattcttgtgtagcagaagcagtataaaatgtgtttgggttgcccacatgcatgcacacatgactcatgagagactgtcaaaagcacaatctgcatgactacttacatatggacgttcactcaatcactctctgcctgctgatggtgtacggctccgattcctgtatagagcgtatagtaccagaattccttttcttttctacaagggcatcgtcactttgtgcctctttgagcaactgttttggtgttggggtgagtgatttcgttgtgttctttgtgcattggctggcgtgcaaatcttgaccactacttccacaaaggttttttgcgagatccaattactactacagtactcctagctaggcactagatttcaatggctccaaggtcctgtttggttccatgggctaattattagcctccaccttttagctctaaattaccctataaggatctaaatatgtgggctaatttagggctaaagtgaattagacccctcaaaatattagcccctccaaggaatgctaatggggctaattttttgtggggaccatcaaaaagcagccatatctccctcaatctctcctctctctttactctctctccatcttttagccctcaattagcctatggatccaaacatattaccctaaactaatatttagcttaccaattcaagactaaacattggttctcaaaattagccctgggttaatcttccaaacagggcccaagcattccaatcccggtagcactagcgtagtagtgccctttacaagttgttgcagaaatgaagtagtccgtgcgagtgcgtgcgtgcgtgcttgcttgctcgttctgtgtgtgtggccggccattttatgtgtgtgtggccggacattgttgcaaggcatgggtactaagcttttcttctggggtatcctaagctcctaactgaaaattcgaagctgtcctagctagccagctgctgaaatatttactcgcagttgcagactaacagttcagagctgagctagctacggcagccagccacacatccggatccagcaacttttgccacaactttacagtcggaaaaacaaagataggaacgccaagagaggaaaaaagataaaggagtaaatacaagatcagccaggcaaggaaaagcagtaaagttcggtgtaatccgtggtgaaggctggcaatggcataagattcaaggcttcaaaagcacaggggcaaagaggtgcgaaagtatatgcgaatcagtacgtgacctgcacgatcgaggtgaggagcagccagcagcagcaagttttcactcgaggtgagacttgaccaaacgtactactgctgctgctgctgggctttactgtgatgtaaactgttagtaataaactgaacaaggcatggccactggatcagatgatggctactccaggaaggatgcaaaatgtctccccctctttgcagttgaagtttgactgcctcgtcgaatcaacggataagcaggcgatcctggccatggttaagtttcatctgccgaggtggtaaaaagccactagtagaatattaatccatgtccaaaatgtaccaaacatagattagtgagcttagcagtaaaaaagttagctgtcctagcttagaggtttgtgctgcaattaactaacgatttccaggtacacgtacgtgtgctgtatggtttagggcaataactataatgtaccatatattgcccctaaaagtgtcacattggattgagtgatgagatggatgagagaagtgaggagagagtagatgagccacccctaaatcaagaggcaacctccacacaaattttaaaaaatatgtgagaatattagacatattggtatttgtgtactagaggtgatacattgtatgagttaccttttagttcatgagtgaataaaataaataaatttagaggtggtagtcacatctatcatatcacttgccctaaatacaactccatagtctcccatacaataagagcataggcaataaaataattaagtggatatatatagacgtagttaaagttcgactagaagtgctagtcactagtaattaatttcacatgtaaatatgtgacaatagaacactggctctttagcgagtgatctttgttttaggtactggatttggtttttgaatgttcagaataactaatcaatgaaatttacctgacagaagaaaggatatcgaacgataacgtcgcagtccgcagcaaacacaagcatggtagttaatcattatatcagcttatcctagtgatgcaaaattccatgcctgacataatctggaatttacctgcattgatacctgacaaactcttgtataatactgcactcatatctgtgaagtaaaatttattagcgttggattccgccgttctggtatatttagaagcttcgaatccagaactgaccaccagttaaattattgccttccctatgttcttaggcacagcgccacagaatgtacactggagtgcttgcaagcatatgaaattatcagaaccagttcagatcatgaattttgtatgcttcactcacaaaaactccaaaacgaggattattgtatttgcgagagggtatggcaattgagggagatcttatttttaagaactcgagatgttgttaaaaaaaaactctagagcacttcgtcttgttggcaccttccttggttactctaggagatcgagtataactatagtaaaactggctacttggtagttgccccatgagacataaaaatcagacaatgttatacaattctttttgtacaactatcatcatacatttggccaaaattgacatacagtattatgttggagcatactaggtttttgtttagaccttataatttgctaggcaaaaaaggtgtacaatatcctaaagaaacaggagttggaattctcatcctacactagctgattctatcacttgatggacattctgtactgggtattccttgtctgactcacaatcatatggtctgtgtagacatggaactagtgtgtactcatcgcttcacccttatacatcattccttaagcatactgtactactatatgctatctcttcccttttcctttttctgaatctgaaaaactaaagccttcatctacctcttcctattaccctatacctagtcacctaggcctcaacatatcacttgtctttctcgaactagcttctgtgctatatagaaaggaaaagcgacaaaattcacgaacagtgatgttgtagtcctttttgtgcaatcttcatatttacagaacttaaccgctcgtcttctttgagcccggagaacatgcatttcacaaaataagctctaagggtgtttgggatgcaaaaatgcagagaattttactattctgaattataactaaccaactactaccttttgtactttgcgaattgtcttcttccacattctttacagatcgcaagtgccaactcactttgtcttcagtggactagtgaatttagaatcatggtataattgatcattgggcatatggtgttattacgttttcatttatgaattatcagggataactctaatggtttagccggtgtactgagaaaactaacccactttctaaaaaacatgaatattagagaatgatctaatatcaaataaatataaggagtgatactttgaacctaagccggctagcccaccatctcatggaactagctggaagactacaggtatttctcactaacccactttctcttttgtactataaacttggagatccgtactggaattaatctagtacaatattttacatattcttcacaatttgccttgcaaatgaattgtttcagttaagaactgaacatttcccgagcaacgaaaagattcaggcatttcgtatctttaattatacagatatccgagactcagaaatggaggctatgaaccttgtagtacgtacctctatcaaccaaccgtccctccctcctacactttttcatggaaggatcaatgctcattttggcttggatttcgtttgtaaacatgaaacttcaccaaatagttgccaattcaacaggaaaacatcgattttttttaactactgaaaacttccaaaaattagaaaaggttaatccttaaccataggatttccagtcccaaccacatcgtttgtattaaaagatgctgtattacatagaacccacgtgcttaacttcaaattattcgatctgcttcagaaaaaaaaaacgctactgctgatcacggacactaaaaccgtggtacggtctcctataacagaatgggaatcaagccaccaatcatacactgattaccgaattatgcactccattagacaccttaattttttcttgcaactggatttaaatatttaataatttatctccactgcccgtatagtatgagacttggatcggattggtcattactccatccgtttcacaacgtaagtcattctagcatttttcacattcatattaatgttaatgaatctagacatatatatctatctagattcattaacatcaatatgaatgtggaaaatactagaatgacttacactgtgaaacgaaagaagtaccatttttcctatgaaagaccaccactgtttacctgtggtttacgacatgtgtatgcatgtagacatgtactactcccccccctccccccaaaaaaaaagaaaggaaaagaaaagaaaacaaatgccaaaacgtcaccaggattacaagttgtgattttaaaatttaaaattgattcattataaggctgtctgtccgtataatacaacaaaattggcactagtttgcatgtagttttgctctgcatcagctcccaccacgtgaaactgtgaataactggggcatgcatgaactgagatttttctttttgcttccacttacacacaactctgcattacaatatctgaattcagaagaacaaagtgcatttgtaatctctcacagatgcatgttcaccgaagtatattgtccccgaagcacacactcttgtgactcactctctttagttaatttcaattgccattctctcgcttcggaatccgtgcagagaaatatggcaagtgtagaaagaaattgccagtgaacaggtaaaagccatggtcccagacagatcagagttgtaagtgacttatctacacatacgtgcatcacttcctttttgcatagcctatagccttgttttgagaattagacaagagttattttaagagctattttttagcataaggaaatagccctctaataaaatagtcctaaattgtttggattcaagggttattttgagagctatttagcctttaatgcaccttcccatgaagagagatagaaagaaaagacattttttcagtgggccccacccgaaatagccccaattagcactccttgggtggaatagtttttttatgtgttatttccaaatagctctcaactagctcactcttttgaatctttttgagctatttgggctatttgagggagggctaaaaagtattacttggatccaaatagggcatataagggcctgtttacttcgtgaaatgaaaatttttggatgtcacatcggatgtttgaccggatgtcagaaggggtttttggacacgaatgaaaaaactaattttataacttgcttagaaaccgcgagacgaatcttttgaacctaattaatccaccattagcatatgtgggttactgtagcacttatggctaatcatggactaattagactcaaaagattcgtctcacgatttcccctctaattgtgcaagtagtttttcttttaatctatatttaatgctccatgcatatatccaaagattcgatatgatatttttaggaaaaactttttgggaactaaacggggcctaagttgagtgcatgcgaggagggtactgttcactttgtttcccaaacacataggtgtacattgtacagtgaagaagagtggccttcttcctcctgtcactctctactgtagtgggagccatgctgagctgcttttcacataaccatgcccaaattataatctgtctacagtagtacaaccaaatcatggagtcttggttgtggccccaaatcaccaaagcagaatatacggtcaacttttttgtaactttttttctcccatcttagatggttgccaagtaaagttgaagagatacaataacgaagggaaacagtaaggatagctaatctggatggctttaaaaagatttcgttcagaagatctagtgcctatggagtgtgtgacagcttgtaaatgttgaaacctgagagaattatgcatagaaaaaaacctagcatcataagtgtcttcctagggtacgattgataccacaaatgccatcagtgtggcattgacttggacattttttttaaaaaaagggggagaaataaataattggctggtttgataaacatccatgttattttactttgtcacaaataataatccaagcagaaagaacctcagagataaataagtgatgaattcgctcatatcacatctcatttggggcaaaattttcgatttgagatgtgttactagtaggggcggatctacagtacaagcgtcggtgtcaggcgacaccgacgactttcggcaaaacctataacaaaactgcttttccatatgctataacactatgttttaagtataattagtatactatgacaccgataaacacgttatgacactaaataaccgattttctagatccatcactggttactagtacagtgtagtactgtatttagcaacagaaagtggcacacaaacactgacacgcatggttgagataaacagtggcaggagcccaggaaaggtaacctggctcagagaaacaggagaataaatgattgaaccaagaaaaccacaaaaaccatggacttgcagtgaaacccatagccccagcagacagtagttgatggaattaaagacaaaggcagaagtcacaggcaggccccatgcacattgagcaaaaggaagcccaagcaagtgccggaaaagatagggattggcctccaagtaaattctcgctacagtgttatctccctccgaagttgcaatgagatcttgttataattctctctggaatctctctggccatctccctcagatcttgctattcccaaagagattggcgtggtccaccagtccactctgaaatcgtgagacctgaatgtcaaaacgaaataatggaaagatcggaggaagaggataaagaatagggaaagagaagctgtcattggtgcatgatcatttcctcaggctcatcatggtggctaaccttttcatttcatccctttttaactatggctgtgcttagttcagcgtaaagtttggattttgattaaaattggagatgatgtgactgaaaatttgtatgtatatgataggttgactgaagttttgatccaaactttggatctaaacacagcctataataaatgcttgaaatccacgatcgttttttcagaaccaatctatttcctatcactatgcataaatctaaaatgcaagggatgatagttgttgaaatggcatgttcgacaaaagagctatgggacagaagacaagtgctaatgatagttgaaaaggtgaatgcaaggtttgaagaaataggatggtgttagtgcaagcaacacccatcgcacacttgcacgttcaattatacttgaaaaaagctacggtctagaaaaccttttagaattagtgtagctaacaacttaacgtgagttaactttcaccataattattatttaaaattgtaggtttaggtatatgaaaatgatatcggcaggtttgctataacaaaagatttcataaaattattagtacaaactattttaatatctttataaaaggatgaagttagaaccacggggctgtttatttgtgctacttgtggctgtgttacagctaccacaacaatatccacaatgaaaaataaactacgattatatagttgttgtggctgtgatgttgtaattagcacaatgatcagagcctatacctttattgtttttaaaagcctaaaataatatttctagactagtaattcgagttttcattaatagagtaccattaattaaccggtctcaatttatgaactaggaagcttgcgctcctgctcatgcgaaaaggaaaaaagaacgagggaaactgtgcgaaggcaaccgttcccacgggtaggatcacggccattgcacgttgttcatcccttagctggaatgttgcaagttgcaacacgaacacaactagaataaaacacaagtactctctctataaaaaaaacgttaacctaaaataaaatgagatatagtctagtgcaataataaatttagataaaaatgatgatattagattatgtcttattttagattggatttttttatgaacggagtacgccgctagccgcgaaccctgttcaccgcccgacgagcgacgattaccggtttccaacggacagccggccctcgctgtcttagtgtcgtcaaccctcaggcaacccactccgtcctccgtgttttggcgcctgcctgtgccgcactgcagcctacagcggcgcatgcagcgtgcgtctcgcactagaggagaggcttgctgtcgtctgatcggtttgatccgctgacgaggccggtcaagcccgtaccatccagcggtaagacggaccatcaagacgggcgggaggccgtcaatgccaccaccaaaccgaaccacaccccctgtgcaccgcaaccgcaaaccccctgctcctctgcatcgccaggcgccaccccattccgctcccttccaaaaggaaacggacaaaaccagtaaaaccacccgagtgtgtgcagcgtgagaggctacactagagctatagtgtgtgcgagaagggggagaaaaaagaacatggcctcgtgttgcctcctcgcctgtcccctccattccccgtcacattccccacactcgcgggcttgggtgcggggatagcgaactccggaactatagccatcggtcatccttgtatttttctcccctctcgctacaaaacagccgcggccctgccatatcaagcccagaaaaagaagcgtcgttgcgcgagtgcaaacaaatcaaccgggaagtgattcccccaacccaaccttccccctctctctctctctctctctctcacgcccatcatcatcagaaacccctccagtttagcagtagcgctcacccgcgtgcggtctccatccacatccaccctcttcttttcttggcgtttttggtggttgttgctatcatttcctcatcactccgctccgctccatgtcaccgtggcgaggaggccgacgcgccacgaccacgaggagaagttgttaaggtttttgtgttggagttgtgtgtgggtgtgtggcgatggggtgcaaggggtcgaagctggagcagcaggaggcggtggcgctgtgccgcgggagggccgacctgctggcggcggccgtgcggcaccggtacgcgctggcggaggcgcacgccgcgctggccgactcgctcgcgtcgatgtccgcgtcactgcacctcgtcctcgcgcccgcggtcgccgcggggacggccgtcgcgctgccctccgcgcgcaaggacgtggacgccgcggccgaggccgctgcctcgccgccgcactcgtcgtcgcacatcaacttcgcgccgtcctccggatccgagtcggggtccgtgtcctcctcgccgagccgccgcgtcgccgccggccacgagcaactctaccaaccgagcgcgctgccgttcccgcattatgcgtacggatacgggtacgcgcccgagccgccgttcgggtacccgccggggtcgctgcagctctactacgcgcggagccgcccgcccccgccgtccgtcgccgtcgagcagcgcgcccccgcgtcggagcgcgtctacttcggctcgttcgaaccggcgcagtatcacccctacggaggcgagaccaggagggcagacagggcggccgcgccaccgccgtcgccaccgagggcgagctcgtgggacttctttaatgtgttcgacaactatgaggtgtacgacaactactgctacgatgctcccggcaccggcgccacgacgccagcgccgtacacgccaagccggagctcccgggaggtgcgcgaggaggagggcatccctgagctggaggaggacgacgcggtcgtcaaggaggtttccagcgagtactccgcgcacgggagcggcggcgctcgcagccgacgcagctctatcggcggcgtgagcagcagcattgccgaagtcgacgaagaggagaatccagtcgtcgacaagggagtggtcggcggcggcgtggcgcggcaacagacgcctgcgcatggcaacgtcgccgcgtccgttccgactccccggagagccgccgatggtgcagacgttgccggcgagatcaaggcgcagtttgtccgagcggcggacgcggtcagggcgctcgcgccgattcttgaagtcgggaggcggagctaccatccccggagctcagtgtaccatggtgagctatctctgttctttgtataacctacgcatgcatctcccgattacctcgtgcctgatcattggagccattgtttgattgctgttcggaaacagtttcatctcggatggtgtcagtgattgcgctgccgcattcaggatacggaggcagcgacctgttggatgtcggaggaggggagaaggtggtgggagcaaggaacttgtctttgactctgcaaaagctctatatctgggagaagaagctgtacgacgaggtgaaggtatgtatttacagattgaaggtgcccaccttgttaagtaggagtagtaccctattttgctgtatgatgcagtatattttttcgacagtatgatgtagagatatgttggaatatgctagtagcatgttaaatgagatgagccctgagattgctcttcaaagtgttgtaggtcaggatgcaaaattgctgctcgctgagtggtcccatactcccatttgaaacaaccgagtacaggtcctgactagagagcaataccattcatttcactgtggcaagtttgcacagtgacaacgtccttaaccagtcaccaatagtcacgcctatgtagaaagatggatttgagatcttagcatggcattaggtgttttaaggctgaatcttgttgagatgttcatgcattatgtattgcccactcctcccaattccaacctactcatccccaaacaaaagcatacacccctaacagtgttggttattttagtactgttgcattgggtctatcttgaattaggtgtgctgcttgattaagaaaatggctcattgaatagcagagttgaaagtgcctttatggggacctaacagccagatttggaactgttcttttacttgctgtattctaagttatgcattttcttcataagcctattagtgagatttatttagtaagaacacttacgggttggtgccttttcctctaatggcaattttatcaagatgttgctgccatgcctttttaggttcccttgtagcataacaggacaatattatattttgttttcatatcattatcaccctacgtgtaaactaataatcctatgaggaacccatcaatgaagaattactgctcttacattggggaaatcatgttgtttgcttgagctcacccttggtagtctctattccgtattgaatgttttggtgctgttttcctcttccaggctgaagagaaaatgcggctcctgcttgccaagaactctaagaggctgaaattcttggatcaaaaaggcgctgaagctcccaagattgatgcaactcgtaatttggttaggaagctatcaacaaaaatacggatagctgtgcgagttattgctaaggtgtcgaaaaagataaacagagtaagggacgaggagttatggccacaagttaataccttaatccaagggtacactctattctttccctctgacatttattcaaatagtctgatttagctttgtctttacccattattttttttattttgtaatgtcagtccacatgtgtagtatgtctatcagaaagtaactgccttaattctgaaggtaattatgtaccagtgcactaaattgatctctgtagaaattgacacattttcataacaaaaatgatttatgcacatttaagttaatcaagttaaagcatcacaaacagtcatgtgtacgtctagaattgcttttttttttgggtactctatggcaaaagtgtatttgacgatacctatgttgtagaacaatcaagtggaatactgaacactccaaatttattttctagatattcttgcatttcatattatcttcaaatctagtttgtgtcaaaagaaaagtcttatagccatcttttacaggtttgtgaaaatgtggcaagataagctgaactgctaccacatccagtgtcaagcaatatcagaggcaaaaaacttggattcaataatttctggtggaaccagtcgagatctggcaatggagcttgaactagagttgattaaatggatcgtcaatttttcctcctgggtgaatgagcagaggagcttcatcaaggcactgaatggatggctggcactctgtcttaactatcagcaggaggagacggctgatggagttcctccgtattctcctggaagagtgggcgcaccccttgtgtttgtcatctgtaatagctggtcccaagctatggatcggatttctgagaaggaggtgattaccagcatgcaagctcttgtgtctagtgtacggagcctatgggagaaacaaaatgttgagcaaactgaacagctgattgcaatccgggaaagagaaaaatggaacaagatattggaaaggaagaccctggagattaacaaggaggccgacacactcaacagaaagctagctctagtaccgggccggcaaagccttcttccaacagcacaaacgtaccaggtccattttcttgaggcaaacagtgtgcaggttagtttgaagcgtgttcttgaagccctagaaagttactcttccaattccctgcgagctttggatgagaccctgaggcatgccgaagaggaaaggttgtctagagaaagagccaaagtttcataggcattggcatagaggttccatctgacactacagtgaacacagcttgtaaaatacaagggtctcctctccaggtggttataatttatcagatcaatgcagaatgttctgggcaaatgctgcttgcagatcaaatttttgtggggaagttctgactttggagttttgctaactgaccgttgtttgtcgatgcagttcaggcaaatgtcctgtgttgatccatcataatagatatagttgtgttgaagtagcaggtacattaggtacatataggtgaagtgctcgtttcggtgctagtatgcaatgtactgatcttctgtgttgcctttttcttggcctccatacaattgaatgaatgagcaagagtgcacttggaatgaatgtgcaactgtgcaagagttgaaagagttgaatgcagttcgtggcgttgtattgagtatttttccggtgcacttgaatgaatgtacaactgtgcaagagtggaaagagttgaatgcagttcgtggcgtagtattgagtatttttccggtttaatagggaggtatatactccctagtatattctagggagtacctcatggttacttctcatggagtacttcccaagagctataaaaattccagagagcaaaataaattctgctaacaaaattcaaaaatcagaaggaaaattgtccactgaaatcttgcctccctctctccttgcacaggcaaatgagtcatgcattcatctgatattttgacgaccgtgatgaaaccattatttctgttaagagattttttttctccaactttctgagggtttttgtattttgtaagtttggtgctgccgagtgcacatgaagtgtcctaccttggcgtacatccagttcgtgtcagcgactttcacgaaattacagagggagttgtgtacttgtgttctggtacaataccttgcacttctgtaaaggaactcaattacacttggccccttgaagcatggcacaatttgtggaattctgcacttacaatactctgaccgcacctatagatagaaaacgagaaaccatgtacagtatcaaacaatcaatcacacaagtagctaagcaatctacgggagctgtacgctagcaccaaaatttaccagcgagtcagcaacccagcttgtattccgtagctcctgtacaaaagaatatcatgatttcttgatttcccagcggcgtccccgtatgacatacccatctgatgtctggtcgctgccttcccaactgtccacaacaccagctgagcttacgtccctgcggtgccgttttcctctaccgatcccactgtcactagagctcccgcatatgagaggatcatcgatcccatggattgctctctgtggcgtggaggtactcacccaattgtcatcacggctttgcccgaacttgcccttcttcttcattaatttctcaaagcgcttcccgactggtcgcactgcttgcttcatcgtgaatttgagatcttttatcacctaaagataaagaaaaacacaaaacataataagaatattggcaaacacgtgcaaactaggtgaagcagataaaaaagaaatggtgaaacacagtgagaagcccacacctcggaggggtgaaagcagtagatatgagctctacgaagaaaatcttatgaagtgtaaaaaaataaaagaacagaatagatttaaatcttggtaggactagtttgcaagaactcacatattctccactgccaattacaaagtctcgaacactctctttaacatttgtcacaattatctcatctggttccaactgtggaagcctcaatttggtaggccgactaatatcttttatctcatcagggtccacagggtcagtggcggcatagtcccctagcactgaaatgttttcaggtgaacgatgattacctaatagcgaatagggctttgcagggaacacatataggtgaacaactgaagcaatacccatctgcgctggaaaaagaaatacactctgaggaaaacatgtatgaggagttgcccgcaggtgatataccgtaggtgaattcaacccaagaactctctttacagaaatgagcttgcaggttatgaaaaataaacgatattctttggaagcccgtctaactcggaaaggtgaggtacctctatacaaatgatgaaatcttgaatgcttgactttaactccaagctctgtgccaacggacttctaaccaagcccaaagaatacatgatagcaatcataataccctgccaccaagttaaaaatactatagatttgaacgaaagaaattttgccaatggctttatatgtgccaattcgtccttagtagccgtgtaccactccaccaaacagtatagggcccaatattgactgaagttaaggacagcggcaaagtatgggtatctgcagtttgaacaaaagcaatgaagttgaaaaaatggataagcatgcataaaataattcattgaagtggactgctagatgttcacatatattctggggataaagacaaggtgataacagcttatgcagtgacacaggtagagtcatcaagaagattgcattactcttctatgcagttatctgtctctgcattattcctattataaaatttttccaagcattatgaaattcaaattataaaggtgaatgccttttgctttgctgaactcaagacacaagaggtgaaaatggaaaattgtcttacccgcatctcaaattgaattctccatcacaatatgcaccaaaaggttgaagaatcagggataggctagctgtgagggtctttataatcacctgcacaggtacaaagtacttaaccaatatgctctcaaaatcataaattccatttcaactagctggacaagtggtcatacatattgaaatataccaaatttgataatctggtaaaacctcacacccattctccatggtttcaatatgtaattcacagggaagtgatggtgtatgatccctttttcagaagcaccatgcaaaagaggttccccagaatctccgccaccctccctcttcaaaaatgcaattgtcctttcttcaccacctatatacaaaatatatacattttttttcaaattaaataagagcgatagatggagagcttccaaattattaatgaaccggttccatatagtatttttatcatgttaatcctactttccttgtataaaaaagcaattaatgggaaaatatacatagggatgcattgtttgtttgtccaaggtgacatttttagtagttatacacaggttcattttattaagcctcttctctcgggtaaattccctcgaatagaatccttgataacaacgatactgttatctcaggaatttaggcagatagaatggtggatgcctttgcataaccttatcgaacaatagttccagttgttctggggtgaatatagactagctgtatacatggaaaacctgtatccagttatggaggtacatattatatataaaggaccataaatgaaatcatgcctcattccaatgccaaaggtctgtttctgttacttggtgtgttgaaaaatttatgaatgcccataaattggtcatcctgccaaagttttgcccaaattgaaagcacaataatatgtagctagtcattgacaaagtccatggggttagacaggccacaaaccaaacataacccaactacctgcattgttttaacatatccatccccacgttccctcaaaatgggaaaaaaagattggtgcatcatagcaacatcataaatgtgacagatctattgcaaaaagagtagaccgtagatcaatctttaactaaatgtataagtgcaagtagcaccctgagagtggcaatgaaagttagaatgtctaagaaaacagctcacctaaacaagcagtaatatatcttccaaagcaatacatagcaaatgcttcataggcgtcacgcaggatgccacagtacacgctagtgtcaggatttaccaatgaaacatactgttgcagaggagaagcaaagatcatcaaatacgcaactaaaatatctgaagagccctaatccaacaaaaaaaaacagaagttgctttggagatattaccgactcaactgcatagcaagggaccatcaagataacaccgagaacaaatttctgttcctggaaaaacacaaaaacgaaatggatattgtttgcagacatgacaaaccttagtattgataacatggtggagttccaaagcaaacctctggattgttgtatgctgaaaggtgctggaatatcaagtacatagagagggaaacagaaagcagcatgaagaaccctgaaattagtatggcccatgtgggtgctgcatattcggccatcaaaggcaggaagagcgcaggattgaccctcatgacagctggtaacacttccttgaagtccaataaacttataaggactcaacatcatatagtctccttaaccataaggcggagcatttcaattgaatgggcttggtatcatatacatataacccaatgctgccaccatatgaatcaaattcccaacccaaatagtttactatctgcaaggaaaatgtctaaataatgtaaatctaccaacagcacgaaatttcatatgagaattgggaaattgagtgactaatagaccaccctatttagagataacggtgaataattgagtatgtaaataaaatctccttgcctactccaacaggcctataggaataggagtgagcagaaatgtagaattacacagtgtgctgactaaacgaattcaccgttttaatagattcagttatgcaagaaaaacttctttcccccataaacacaatccaactaggcaactagtataggcaacgatagttgcacaaagtctagctaataaacccgctcacatattttttttctctgtccataaatccacgagcaactgaagataattctcacggctaatgcccttcataccataggcgcgaccaaaatccaccgctaaggcaaagttacagagcaatcagatggggttcgtctcgaattgaacaacccggcttgcggagctgaactcctaaaaacctaactaacacaaaatagatgacgcggttgcaatctaggttgggacggaatcgaattcgaaacaatcgaagagccttaggggaaaagccaaaagagagacacccacccaagctagggtggaatcgaaatcgagtacctgggcaggtgagcgcgaactggcgtgggcggcgtggccagttcgacgatcgccggagcagtttgggggtttgggggcggcggcgcggcggcgttcgtcgcgcgtcggcggtgtcgtgggccagccgaaacgcgaggagagtagatgcgctgacgtggcgtcgatagctttcacggctccagctggaaagttcgggagtaacacggcgtgtttagcgagaaaatctcttgattttctttttaaagaccaagaagaaaaccattgggaactcgttgagcatacatcaattgcttcacgcgaacgagaatcacgccttccaccgcgcgagcgatattcaactgtggcatatatttaggatgtagtgatgtagtactaccgaattaattgcttagttaagggtcatttgcgaatatgatgttgcgaaaaatatactaaaacataatgagccgtttaatgcgttttcagggaacttttattatctcctttgaaacatgaaacgcatgattaaaaaaacagagaaatagaaaataaaattgtaagtgtaaaatatagaactataaaataaaatataggaaaaatttaggaataattgcttgattagacagcaagaaaacatatatgaattagaggagatcaaaggaaactttccttggggttcaatctcatatttaaaattcctccaaaatatatacagatagaggcatttcttagaaatattgtaggattcaatagtatccatttttttttgaaagggtcatagaagaaaggcagaaaatgttatataatttaattcctacaaaatttagtgtttttccttcaaatcagggcaagctcaatatatatggtgtagcgtgaataacgatattgttagcaagatcttttacgtgcctggagcaatgaagccggtagcaccactgctatccatgaacaagctacagccaagcagagacttaaaaaaagaaaatcacaaagatttgtgctccttttgtttataaacttgtgtgtaagaactgagtttgttcgctcggaatttatgtggttgtatgtaccccattggtgtatagaagccaggttttataaattcctattatctaaaaagaaagaaaatcacaaatcttgaatgacacaaagtttatccttcaactagaacatcaattactgttaggctcattgtttggaggagctgagaaataaccggcgggtatccagttgagcgctgaagaagttacgtttattgtctaaattctatatatacttattgagaaccgagagtaaaatcaaagacaatttgagtactagagattctaggagtggagtagctgttgcggccagggttcaatattttggtttgaaattttaggaatcgcaacccccaaccccaaaaagatcgttaaaaaaaataaatttaatcaaaacttgtttaaatttcaagtttttaaggtcaaaattttcgggcaattcgggaaattttgtttctctggatgatcaaaagtatttttgatttgcaagatatagaactttggctgctactaaggctgcatttggtaccaccaattagaaacttgtctctcacgcacgtataacaaagcaagttattactccctccgtcccataatataaggtattttgatttttttcttgtattgtttgactactcgtattattcaaaaaattttggaattattatttttttgacttactttattatccaaagtactttaagcacaacttttcgttttttatatttgcacaaattcttcaaataagatgagtggtcaaacaatgcaaataaaaactcaaaatcacttatattatgggacggagggagtagcataagattaattaaatattagctaaaaactttttaaaataggataatatgatttttttaaaagcaatgttagtatataaaaattttataagagacgcatcgtattttagtaagcgtgcgaaaaaaataagagaaatgttatgggatgttccatacactcgcacgtactacaataattaggttttacgaagtccatgggcatggagtcatggacaacgtattcactaatcattgaaaagaacaggtgcgtgcatatgggaaaaaaaagaaaagagaaatagaaaactaaaaaaggatagagataataggaattattggtccatgtggtgtgtgccaacaataactcaattgatgatgtgtgcagcacaaggcatatgcgagcttcggttttttcaagagggttggcttagagaactatgtttgttgtaccgaagcacctcaaaatttttaagagaatacgtatacaacattcaacagaaaaccacacctaaaatctatcaaatgtaactatataatgtaatcaacaacatcaaacaatatttttttatcagcgttttagaaactatcgttttaaatgtccaaaaatactacgtagccaagatgctttattctgtttccactaagtatatatagtgtataaacatatcaatatatatttacatcattatcaacggcatccgcaagatgttaatttttccccctcatctagaaattacgctctatgtccatatggcacaccaaagatttctgtgtttctttcccgagaaatcggtcacatgaaaggattcaagtgttccgttcggacatcagggaagaacgatcgaggatcagaaaagaccaaagcatatggtgcagcaaaagcattgcgtatgcccacgatctgcagcagctgcaagcgccggtcgctcttacgctatctcactctcggagacgggtggccagcggccgggccagcccagtccgaccccggccgcggcgactggccgtaaccgtgcgcgccgccgccgccgccgccccgtgccgcgggacgcggggacgccgagccgggggcgccaccgccgctgccgcccctggacatggactcgatctcctcgaggacggcgacgacctccctcatggagggccggttcttgtggtcggcggcgaggcaccggagcgtgagctgcgccgcacgctgcgcgcccctggacgagtactgcccctcgaggcgcgggtccatgagccgagccagcttccggcggtcggacaggaatggcttggcccagtccaccaggtggtgctgcccgctgggccgcccggcgtcgagcgcgcggagccccgtcaggagctccagcagcacgacgccgaagccgtacacgtcgctcttcacgtacaggtggcccgtcgccacgtactccggcgccgcgtagccgtaggtgcccatcacgcgggtcgtcacgtggctgctgccgccggccggcccgtccttggcgagcccgaagtcggagagcttcgcgtggaattgctgcacgtacgcatgatcaatccgcgaggaaaaggagatgatcgagttagacgacggcgtgtactctggcgggaggcggcagcgtgcagggcgttaccgtgtcgaggaggatgttggaggccttgaagtctcggtagatgacgtgcttctccgacgagtggaggaacgccagcccgcgggccgcgccgatggcgatgcgcagccggaggctccacgacagcggctgctgaggcgacgcgcttccgccctctggttgacacaaaaagattgtcatttttcagctctcgttctaccgttcagttacagtgtgttcagaaaaattctggtttgattttccgatgccagctttgcaatccaataatgaagtaaattccattgtcattccaattccaacctggcaacccaattatatctatatatctatactcttcatatcaagctagcttttgatactctattcacctgtataaattatgcactatcagttgactctgttctcagaacatccactaatcccctctccatgtgaagcagaacaatgatctcaatttgtccccttgtgaccaccatcaggcatcgttaattagcagcccaagtcaagttgtcagctcttaataatcatggccataccgtcatggatctgaaagcaccatgaaaccttttgtcttaaagtttacttactgcgtggctcacttctgaagaggtggttctccaagctgccttgggccatgtactcgtacacaagcagtagctccttgtcctcccagcagtagcccagtagcctcaccaggttgggatgtgaaagtctccccagaaaattcacctcggactgcaaacaaattcgttaacgacacagtggaaaagccaaaaagaagaagagaaaaacaacagtcgcatcagcacccgacgtgccgaccactaaacatgcacactgcctactgacgaaccattgcatgaacattttaataccaacaagatcaacaccatttcttcatcaatcacaaggtggcatcccattttgtcagcgaagaaagatttgactcatgcatctcagattatgacgggaacgcgtccatgcgtcggggaactaaggaccaatcgtaatttatgcttcgcatgagaatgtgatgagatcaagagggctaaatcatttagtcgcggattctacaaagttattgttcttttgatcatggtttatttgacgaaaagaaatatcacgcacctgccattcttgcacgccctgtaagctctccggatcgagcttcttgacggcgacggccatgccggagccgctccgcgcggggctcatggtcctctcgtccacccaccccttgtgcacccgcccgaacccgccctcgccgaggacggtgtccgccttgaagttcctcgtggcggccctgagctcggcgaacgtgaagatccggaggttgggcgcctccaggatcctcccctccgcgctggcgtcgccgccggcgttcgtccggcctccaccaccagccaccgatcgcccgccgccggtgcttgtggctgtggcctggctcggcaacttaccagttggtggccgccctgggctcatcgcgacgcgtgcattgggctgcgcgatcgcgaccatgaccggtctcgccattgccgctgcaaaagagcaaaacccagcacacgaagtgcgtcagaactagagacgcagcaccaaaaccatgacaaaatggctttgttggttccagatcccgatgaacaaaataaatctcacgaatacaaagaaaacgtagtgatattgtaagcagagcatcgggatgtcgatattcatatatgtaccttgtggcagcgcatgacgggccatcaccttgacggcctccacctcgccgtcatcggagccgaagcaattccccatggcggacgcggccggcgagcagccaaacgagcagggaagcaccgggagcacttcctctctgtgagtctcttccccgagctataatggcttgtgtgcgtagatcatgtccttccagcgacgtgcttcgccatgtcttccgctcttcctctattaaaaaaggaggcggaaatgacctggacgtggtgtggaaggacgagacgaggcctggaggaaggctgctcctggctgggcgactggtcgactgtcatctgggaacccatgcatcaggggaggagcacatggcggcatggccgcatggcgcatatcgcggcaatatacatgttttgtggcacactggcacctcgtttcaaatttcatcagtgttcaaaaacattttgagtttctcaagattagaattttttttgcggggtcaagattataatattagatccattccaatgaaaaaagaatattagatccatttgcctattattgtacttatttttcaattttcttttgagaaacgcttgtttataatatgggatatttagcagaattgctaaccttcatttgacacaaatttgagttgaatatctgatgaatccttcaccattagatccttgtcactctttctccttgaaagccagcgagatagtggcgacttaagttaggatcccatattaagatcggggtaggaggagggaattcgccaaccttaaagagatggttaggtagtggaatgggctggcggcaaaattgccatagccgagtagtcggtaactagcagtgggccagtgatagcggatccaacagcaaatagacacaagagacgagaaaaaggtagggcgtgagaatatgatttggcaaattggcagcccttaggtagggcgtgagaatatgatttggcaaattggcagccctttgatttgcagtaggatcttgtggggtttatgatacccgggtattcgatagtagttctttggggctagatatgatggggcgggctgtcgacctccgattttataaatcggaaatcttatgtgtttatcagtaccaatccctgaatcagtagttggtacacacatacatagccgaatcacaacatatcacgaatgaatccaggctaagagagttaaatgcttacattagggccaggtaggccaacaactatcagagaacaacagcggaaaacaaaataatatctagcccgagacctagaatggaaccgcactccgatcagcttgttaggtacgcaagcgtactaacaagggcttctcttcaacactttgctaaaagatatatatagagcaacaatgagtacaaaagtactcagcaagccaccacacaaaatgcagtaatgtataggataatacaacgagtggctatggttactttgcgtaaagctgagttttcaaatatcatttcacaaacctaagacctagcataaactaatcatgttttaattccattgttcattaaacagcgacggttgtgtccactatccattgtgttcccaaggatagcttcctgccactggtcgtcatggttttctggggtctaccccttctcgcctctcgagaagttgatctaccagtacaaaatcatcatgcaacattccacccaatcagattaagaaattagagtctagccaagtgtaatatatgtcccggtgctcaataaccacgagcacgactattcgaatagatttggtttactcacactacagtggatgtacactttacccgtactccgcgacttgcccaacacatgagcctacgtcccaacgaatgagacttgccacggcaaagcctttcaataaccccactttggcagtacccgctccatgaactttagtcctcatgcactctaggcgtccaaggtttctagcagtgagaggagttctggctctcccgggaagggaagactcacacatgcattaagttatagttaagtttaggtttacacatggcagtcctaccgatggtgacaccactgtaggcactcgcccctcgtggtcctaccaatggctgccccaccataggccttgcctcacacacatcaagaaaaccactatgcagggatactgcctccgctcggctatttactctgctaagtctatacccatacgagaagtacggttgtactggagtcgtttcatgcttagcttcatggctcggtccttaattgaccagggacggcactagcctttaccggacaccacccaaatcctccagccgccctagtcgaaaacatttgtttagtttttaactttctttcacaaatcatctcatcaatgtcatggcaatatggcgctcatgtctccacatgccgtatctcaactacctttcccaaggtagttgcccaagcataaagcatttgataaatatgagaatgcatgaatctaaattagcattactaagcattcgtcataagtgactagggactcatacgtaattatgggtacaagggaataatgagataagcaataatcaaaggcatggcataataacaagtaggatattcatcactgcatgcaattttatttgtaaacaaaacaatttcacaattgggatcaacatgctcaaggaatggggtgatgacttgcctgctcaggatagttcttattcttgatataatcttgatcaatcttcacctcctggaagctgcatacgctgcctcacgactaaccgatatacaaattctataatacgcgagaaaaaccaatattcaaacaacaatcaaatgtgcacaagcaaaatataatgatggtgtcgaacctagggttgctcatactattccggcttgctaatggattctaatcatgctaagggccaagattcttagtcttttatattgtcatgatggctctattggtactaactagcacaatatatgatatacacattttgctaatatgtggtttagtcaagctacaaggttatgggagggttatacgactacgcatacatctataaatggtcttatactaagggttctgttgttggatggatttagggtcaaacaaataattacatcgattaatttatattatcattttttccaatgaggcattattttaattatgatcatattttacttgtcattataaattataaaaggcttaataattatccatgctctatatgttagatctgtgaggttataggtacagattatttgtaattgtggtcccgtaatgatcaattacaggaggtcgaaatttataattagtgtttatctaatatacatatttgtcatatactccccagtttaatgtatggaaaaggtaaatcaatagcatagctataatggaatgtacattatatgtgtgtgcaacaacatatatggttttggtcgcctactgtacatgagccatttagaaaggggtaatttggaaccatgccattataattttgcaaagtttgagatatgccatcggtatctcaatgacatgtaggacccacatgagtcaatgacatgtaggtcaggatggcatatctcaaactttgcaaaattataatggcatggttctaattttcactttagaaggtgtactacccaatgctccaagtgattcctgaatatattatagttaaattatacattagctagtttctatgagtgatattatatatgtgatgggcaagtttaagcactggatttgttgggttactaataagtggtaaccagtttaggtatatacgtgctattctatatggtattgcattgattaaattatttggtgattcctccacatctagctatgttattattctcataaacaagttaaagatttatctatgagtattaatattttagttacaaaatatgaggctaaacttgatttaactaacctataagtcatgggtttaattatatggccatcgaatattaaataagtactagtattttcctatacatccattcatttgagacatcacttatacttagtttatgtggttgctacagtgacaaaacatgttaaatatatttatttgacatctactctactgtacaatatcaattttatttattagcacatttttaagttgaccataatctaatcatttgatattaatatattttattaaatagtgagttatataccattggaaagcttatgaatttagatgaatttaggttcaagtttcactcgaatcggagctaaaatgaataagttatgctagtttaaagattcaaatttgagttaatccgagaaattgtaaaaatgcactgttcataaatgatttatttttaatcggaaacattatccaaaacccactgtggttgacatgtgggaccggccctggttgacttagggtcaaaccttcttgtttaattaccagtgggtcccgcctgtcataggaataaaatatataattgtgttttcttacattttaactatagggaccccacctgccattgagtgggctaatcaccgttagggataggattactgtgcgctaatcacatgtgggtcccacacggtttctctctctcctcatcttcttcttcctctcgcctgttaccgagcgaggcagaggcgcggctcagcgcagccggcgtggccggcccgatccgggacggcggcgggcggctcggagacggccggggtgaggcgcggaggagctccggcgatctcccgccgatggcagccggcgcgcgaggagacgggggcgtgcggcgccatcaggcgacgccatgcccgagctcggctacaaggggcttcgatgctagggacatcctccggccgaattgaagggtgagggagcatctacggggtatggggattcgatttcacgaactatatggagaggggagctcccgggatagcctacccacggagagctcgccggcgacgaaacggcggccggggcggcacggccatgggcgctaatcgccgattttagagccggcgctagcaattagatgtatggaggacgctacgggcgcgagggtgtaccgcgagacggcgagatggcgaaacgcggcgaagtggagctcgacgcggtgcaggacaggggcaaacgacggcgacgtaaggtgcttgacaacgtttcttgatgtccagcggctacccggcttcccccatggcgacggcggcagcacggctcttcctccactccctccaacctccagctccggccggggagcctcacaatggtgatctctagcggtggtgagagggtgatcgcaaggtgttcgatgaaatgcatacgagaagaaggctgagagggatgaggattttgttgagggcttcgcttaggatgcaagcaaactatggggataagatcaccagcacatgcctaggcgagctggagtactaatggtgatcggataagagcaatgaggtggatgacgcggataaggtttgatctcctcctccattaaggttatgtggctccatcatcgtacctaaagcctaaagtctgtgcgttctaactctagctgtggcaggaggctccgttttattcattgggcgcgaatgggggcgacggaacgcgcgcacatgggagctgtggcggagcggcggcttgctggggcggttttcccgtcctaaggtagttggctagggctagggatgacgcggattggcgttctggccgttatccatcggtggcgaggtgatgggtgatggcgatggcgacggcgcgacaagacgcgaggcgccatgtttcctggagggaatccggacgcgctggcggggaggcggctaggtttggcgcggttctggtgcggcacggaggggatggcgcaccggcacggacacgatgcggtgcacgggggcgacacgagatgcggagatggcgcgattgatcacgtgcgcggctcagtagtgaccgggaaggagcggactcgcagcatgtgagcggcttgggcccagatcgaacggttcatgggcgatgaacagtgccgactgaaaaagaaaaggaatgggggaaaaggaaaaagagaaagggggaagggctaatctgcaaaagtgaatgggattggatttgaaatgaaatgaaatctatacattctggttttgagaattcaaatgtttgatttgaatatttatttagttattcattagttcccaaatgagtttgctttccattagattatccaaaaattatccaattcaacttctaggctttgatatttcttaaaaactaattaaatattctattgtgacatttaataatacaatagcacattggtcgaatttatttgtatagcaatatattttacatacataggtttaatttatttaagttttattctatgaaggtattatgagatttggtgcaatattggtcttaaacattgaatcgaatactcccataagctcttttttatatatagaactcaatttatttacatgacaaattattttacatgagtgaatctatcccctgagagacttgatgaacattgtaaatattaatttaattattccagtgcaacactcctttatatatagggtcgtcatagtggcgattatttcatggttacttagatgtcatgacacctgtcacatggttccaatatttaatatttggcctataaattaaattagtaattaaccttctctttgtatggctttgttgtgttgtgcgtaaatatttatagggttcacaataaatatcttatttttataattattaatcagttgtatagctttagcttaattttcagtggtgacaatttatagtttgacaagcaataccaaccataacatccagcatgatgcaaaagttttaaaaagttcaaaattttagtgatttttattgtcggggattttcaggatgttacacgggccaagtgccctagactcatccaacttacttctattataagaaaggaattagagataaggcaatggatcttatctcatgtaaataggaggcatgtaccggattataagagatatcacgcatgtcttagctggctccctgatgactatataagggggtcggctaaccctaattcgggtgatcgctacaagctactctcaacgtcgtattgcgaaattctgcacagatccaatctcatacgactgaactagggtattacctctcttcgagtgcctgaactagcataatcactgtgtcaccatctttcctacgtctagtgcacccgataaatattattgccgatctagaaaatcgacatatctcttgttacatgttgtaatggtcttttaggcttctttggcaaatgggatcgggaaatgatatcccatccatcgaagggtaatatcgtatcctagccatctattcttctcatctatatcttcacatctcatttagtcctagccattcatccatttccctttgacaatcctgaatctcataacacatttgcaacaggttctttgatttaggcttttttctgtgttttatcggtgacataaggcccaatagcccagtgccgcgactgaccgcaatgttgggccatcccacacggcccagcccgcttcctccaacccaaaaccgatcgtaccaccgacccacgcgtcgcaggtacagcgctcagcccgtcgctgtcctttatttatttccctttcacgcactcccacgcggccacgcaccgcgcaacgctccgccccaaaaggccagacaacgcccgttgcgccgcctcccaaactccgcctcctcctcctccgctgcacccccgcaaaaaccctagcgcaccgacttcgcgatctccgcgccgcagccatgaagggcaaggccgacgcctccaagaagggcgagggcaggtaagatcctctctccggccgtctttgctgctgcgtatgggcggtggaggagggttttctggcggtggctgttgttggttcacatctgagcggttttgtgtttggtgttgttgttgttgttgttgttaggctcaaggccgccggcggcgccgggaagcggaagaaggccgccgctagcggcaagccgaagcgcccgccgtctgctttcttcgtcttcatgtgagtttctcgctccctcgcccacgttttgctctgttcagatctagtacagatctgtcttgagtttttgtttaatttttgttgattttcttgaattttaatattttttgtggtttttattttttacttttgcaggtctgagttcaggcaggagtaccaggcagcgcatcctgacaacaagagtgtcgccgccgtgagcttcctgacaccatcatctttttcgccactttttggctgatgtactttagatgtccaatttttttctcctctgttggttcattaggtgagcaaggctgcaggggagaagtggcgagctatgtctgagcaagtgagtttttctctgcagtgttcaaaaattagtacatgttcctattaagtgtgtgcatctgttatttagcatacatcatccatgagtatcactagaggactgtttaataattgttctggcctgtttgttaggaaaaagattgaattgctcctaaagtactagttgaatgaaaattgcaatttgtttttgaattctactcagtgaagcgcttaagtacacataagtaccatgggtggctattgatgtgacaatgtgccatatgtttttggcccttcgtgttaaattttattaggagaaggcaccttatgtggacaaggctggccaaaagaagcaggactacgagaagaccaaggccaacttcgataagaaggtgatgatagaataattgtgcatcctaattatagagcccttcaagcgttaggcactaattggacttcttgaattacttcttcaggagagcacaagctcaaagaaagctaagacccatgatgatggagaaggctctgacaagtccaagtctgaggtcgacgatgaccaggatggtggtagcgatgaggtaatcattaaaggaacacccggtgccctattttagcttgaatgcccaatgaatttttactactgctagttgtgttgctaatgaacatttttaatttgctctttgcaggaaaatgaggacgatgaagagtaaatagtgtatccgggggcatgaggtagcaaactgtgtcttaggtcccctattagctttactagtttgctatcttcgaccctaagatgttgggaataggcgtgcgtgggtgtgaagggggaccgtttagaattatggtactcagaatgttttcctacagtggattagcaaagaaaaagcctgaatgccgcctgctgttctgttgcttttcttttgctaaccacttgtcacagaactttgtttcatttgctaatctagtagcaattcagttagctttcttttcgttaatttcgttaattgcatattacatttggtgttatacacttgtttcgatgcatttggtttacctagcttaacacacatggtgaatccctcccattgctttctgctttcgttagatgcctgctgaagctacttcatagtggatggaattatattgttcgttgagtcggtaggcttctgtgatggtactcaattgtcattgcccgctcttatgctgttccatctaattgtgatctaagatttcgtatcaaattaagtaagttcagaccgaagatatgtaagtactgaactcgttttggatattgatgatttagttttctataaacaaggcattgtaggcttgttgtagctttatacggttccctttgctttgacttttcaacttcgaggattccagcaaatgctgttaatagtagcataaaccgtgtcgaccatctgctggtgctccccgattctgacagaatattttcccctttctaacaagtaaaaacaaaagaactgaacctttataccattcgtaccatgagagaacatggatgcctataattttttttacatttttttttaaaaaatcaacttgtacaaataattccgtataaacacttatctagatttattctgattttttttatggacggaggattacctcccatcactccccatctccaacagcacacatgccaaactatccctctcgttggcaacattgtcttcccgcattcatccaccactgcggtactccctctatcaacattgtcttcccgcctttatccaccactattaacattgtcttcccgcctttatgcaccactgcggtactccctctgtctcataacatagcaatctaggactgtatttgatatttcatagtacaacaaatctggacacacccctactcagattcgttgcactataaaatatcccatccaatcatagatcacacccctactcagattcgttgcactataaaatatcccatccaatcatagattactatattataggacagagggaggacctcttacctccgcgttgttgtgcggcaacaatccccacaacgatgaactgctacttcggttagtgcgacggcaccacaccggacaccaccacaacgacggcaccacctcgtccttgccatgcattggcatgagctcggcagtggcgacgaaggatgcacaccagtaaccatcctcatcatcgttgatggaggcgagggtgtcagggtgagcgaacaggctgagaagctagacgacggaggcaactacagctagcacaccatagtgacggactcacaattgccgagtcggaacttgatagtgcactccctgtcactacaaacacggagcatgtcgaaggaggagaggacgagcgagatcaacatcaagtcgttggtgattcacattgggagggaaaacgtccctacggttaatacgcctacccggtggccggtacacgcccatctgcttcctgttcacacgatcattggaggcaaggcaagacgattacgagtgacgtggagctgtgactactacagcaaatacccaataaaggcagcgagcttggattaattgaatagcacggaacgaaagaattcacatctccggtggctaatttaaaaaaacacacggattgaatggtaaatttttgaaggtccagcgtattaggtgagtgagtgaaatttctcgctgccggatactcaggtactcaggtcagccacccagccaggtattcaggtccaacctgcttccgtgacacaagtcgaaacctaacgcgacgcacggttcgccccgcgccgcagcgctgctcacgcgcatacgcattccccctctcctctcctttataaatcccccgcgcgccggcggccggccggtgaccaccaaccactctaccacaaccattacgctatccgccacgagcaagcgagcgagagcgaggcaaagcaagaaggcgacctcaccaaataatcccccaccaccacaagaagcaggggcgcgccatggcgagagccgctaccgtggcggcggcgtcgtccgcgctgctgctggcgctgctcctggcgctggcgtggggagccgcggcgggggcgggggaggtgccgctcggctgggagctcggggtcggcgtcggcggcggcagcggcgacgacgacggcttcgggttctccggggcggcggctgacggcgccgcggtggtgaggcgggtcctgcaggggcggggctacatcagctacggcgcgctgcggcgcgacacgacgccctgctccgtccgcggcgcctcctactacaactgccgccccggcggccaggccaacccctactcccgcggctgctccgccatcacccgctgccgcggctgaccggcctccaccaccaccaacccgctgttcgaactggattcaaagttcgttcgttgctcctctccgtctactcgctagttcgtcttcttcatttttttctccccttccttactctttttttttctccgccctgttttaaccgtgaaagaagaagcacaattggtctggatcggtgcccaggaatcgaatcgagtgaataagatttgtgtcactccagtcctgtatgtggattctaataatattaataatcaagttgtgtataaactggtggatagatttatcgttcaaggatgagtgctgctactgatgacaacccggtgagcaaattcgctcaattgcagcaatcgcccttctccaaacacgggtttccttaacattaaaatgttatcaaatggaatggattaagagaagcagaggttggctaagccaaccaaattgtttactaaatccacaccagctggcctgattagtcggaatggtcagcagctgatggcgccgttgggacttcaggaatcagaacctgcttttctgcatacccaacccacaaaacggttagccaccgacactgcgctccacctcatgttcactggtctgtgcttaatgatgattagcaccagaactgctgctactattcgaactttcgaaagagggaaagcgaaagtagcgtacacacgtttatgactccattgaaacaaagggttcttggaggaatataatcctatgaattcttttattgctccaaatacagagatttaagagtaattttaacataaggtccaacctattggaaacattctgtgtgtctatctttcttctgtttcgtgtggtttcttgcgtttcatccaaacgattatttctatagattacctatgtttctcgatcaatatgatttgagatgctgagatgtttggttgatgaccaatttttatatgtgttttgaatcttactccctttatcccaaaatataacaacttttaacttttaaaatttattttaaaatgtaacaacttcttcatctacattctcttcttaacaaaatataacattccaccatttaaatttaaattcctacttgactaggaaaagtacctgtcacacaacaatgttgtcagcaaattagcaagccagcactcagttcggttcgttattattactacaacgacacttaggatatctgcatatacatatagtgcgtactttagatcgtcatgatggtgcatgaaaccattttcgttaggttagagcgggtagcacagtggcgtaggttttgatgcatgagaaattgagatttgaggaacctctctcgttgagtcattttctgccttggcagcgaacggggttcggtttgctgtgttgggtgcgacgtcgctttcatagctcgcatatgcaagatcctttgtcttgctcgccttggaacatggggcttttttcttcccgtggttgggtgttgaggacttcttcgtccgtggctgtccgtctcttcctcctaacgatcgatcaatcgccttctccaccagccacgcaaattcagttcaaattcttatcctggaatgatattgccaagtagcgaactgtgagcatcatcttggtgatggagacggttcgaagaatgtatgagaggcttttaacaactatagggtgaagcagtcaccctgctacgcatttagaattgaagggttttttttggttgtgtgtgtggtgttaaatggatctccctggtgaagcagtcaccctgctacgcatttagaattgaagggtttttttggttgtgtgtgtggtgttaaatggatctccctccccttgagccattgggctcaagggggccttgacccgcgctctgattgggggcgcccagcccaatagctggtgggcccccgtcaccctgtgccatataaagaggggtggaggacgggacggcacaagacacaaggttcgtcgccgccgccactccaccccacaaaccctaaccgatcgagggggcgcagccagtgacgggaagtccaccgccacgccacgcctcgtcgtcgacaccgccgctgcatcaccgccatcggcaccgagttcaccgtcaccgccgtccacatcaagcgcgcaacgacgacgacgatggccggccgcacttcctcctcctcaacaacgactggtcacatccctaaaccctctcactccctctttgttaattcatctattgctgttcatccatccaaagtgttctacctgactagatctaaacctaggtgatccaacagagaacactaacatgtggagctaccaatgtttaggatatcggattggctggatagaatcaacaggtaccacatacagtacatctgtatgctcatagagttgatattttttttttcaacataaattaagctttaattgatcttctctgttctagaatatagctatttagctgcctacttagataattatatcacgataattcaattactctaaaaccactcacattcttcacatagttattctatagcctataattatttttaaaaactaaaaaaatgatataacaacaagccgtggcaaactacaggcacaagtgttcttcatccttaatctcgaccaaagcaacacttagactataatgaaggctttccgtaagcaatatgtagcgcccgttccgtcgtggcgcctagcgggaaaattatctcttaaaaaccctaattgcgaaatttgtttctttgcttgttgtctagtgtccgtgccatctcaagatctcaatccccgatctatcgtcgagttcaaatccgaatccaaatccttccaaatcaaattcctccgcaaaagtctattttgcctcccccgggtcgaagggccgaatctcgctcggcccatctccctctctccctctcccgggcgctccctctctctctctctcgccctctcccctccccagcgcgctccgctttcccccacgctcagctccgctccgcctcgcccgcgcgccgcgcgcgcgtgcgcgagagccgcgccgagtgctcctcctcctccgctccgcccgcgcgcgtgcgcgtgagccgccgcgccgagcgcccccttcccttctcctcgctctgccgcgcctgcgtaagccgcccgcgccgagccaagtcctccctctccgctccctcgctgccgcttcccgcacgccgtgttcgcgtgcgcgcgcccgcgcggacgccgcccgttgcaagccacgcgcgcgtgctgagtggccgaccgcccggtcgccgccgccgtcagcctctgcacgcgtctgtcgcccgtgtcgtcgcgccgctccaaatcgcccgccgtcatcgccgtcgtcaccgcccggcccccgccactccgcgcgcaagccgccaagggacggaggcagcgcccctcctccctctgccgcgtcgcccccgctcccctcctcctttttcccgaatcggcaaaagggcaagcccctttctccccctcctttttcccctttttcccccgccggcgtcatcctccctgtcgccgctttggccgcgaccgccgagcgccagctcgcgccttgaccgccctaagtcggttcccaaaccgacattgccgccccctttaaaccccagttccttcccctccaatctccctcgttttcgcctcctcgccatagctgccgtccccgtgctctgttcgccgtcgccgttcgttgttgcgcgtgtcgaaggagtcggcacgagcaaggacgcggaaggggacttcggccgcgccctctccttcctcttccccggcccgaggccggagagattactcccgcgccgtcggcctctcgtcacagcgcccctcctcatctcgatgatgcctccctccgttcttcctcctcgccccatctcctccccctagcttttggtagtagctcgagtagactccccgtagctagccggcgccgccccgaccgttgccgtcgctcgccgcgtgctcgccgccgtcgccgctcgagctccgtagcacccgcacgtcgccagcctcgctcggcgtagctccgtccaatccgacgctagcatcagattcccgtggtcgcgtggatgctctcaccgccgggaatcggtccctcgtgacctcgtcggcgtttccctcttccctccctgccggttgtcgccgccgcgattcgccgctgtcgaactccctctggcgaatccgagccgttggctcgtctcccctcatcacgaacaatcgcccggtgtgctagcttttgcccgtatcgccgtggttcgctccgccgctcgccgccgccgcccgccgtccattcgcggccgggtcgtcgtctacctcccaccggcccgcgtggcagccacgtaggcgccacgtcggcgccagctcagcctagaccgggtcgagccgaccccggtcagtccctccccgtgcgcgcattccaccgcgagccgtaaggctgcgcgtgggcccgccgcatccgcgtccaccgtgaaccgcgcgcgtgcaccgcgtccctcccccgcccgcgcgcatgagccgcatactccctccgcacggtgagccgagccgctgacaagcgggtcccacccgggaccacgcatggtgagcccggtccaccggctctctctctcctccctcccgcgcgcgcgcgtcttgggccgccttgggccaccttcttgggccggccggcccgttaagctcggccgagccgccctttctctcgggccgcgccctagccgcccgagggaagtctatattccctccctctccctttttcttttcttttcttttccaaaaaggatttaattaaatcctttttctttagaccaaaaatccaataatcttagaaattcaatatcttcccaaccgtaaatccgtttgactccgttcaaattccaaaatttctcaaatctcgagatctatctaatggcacgcttagaggtcattaatagagctttattttcgccgtttgttgagttgtcccgttttgcgtatagtttcggagcccgaagacccgcagtgcgaggatttcgaggatcaagctccagatctcgagcaaggcaagccacctttgaacatcttgagcctatatttgaaatctaattatattgcttgcaaaatattatgcattgataggattgcacttaatctgttgttctgtctgcaaggcagattggcagacctacctaacttgttgcatttgatccttccattgttaattgctatacaatgtccccttgtaaccatccagttgcgcctcgatattcgtgcaccctgtgccagtatcgacggtcgccttcaaacttaaaatctgagtaacaacttgggtaaaactggagttttacaaaagacttggaaaacccgacacctgggtcggtgcttgcgaactaaatgaatttccaaaaccgcggaccgggaaacgtaccgggtgtacggtttcccgctctcgcacttaaggaccgattccttggaatttcatccaaacataagtcaagtacgaccacatgggtggaatgggacacccctggctgagtaactagcttatcaggggagccttgatgccgagagacatgtggattcgccggggtagtgtcggggaggacccctgggcttcctggcgcagtatggtctgggacctaacctgttgttggtctgggacccctctcgtcggcatatggtaaacctgtgtcggctttggaaatgccttgtcatgaaagcttggaggtctcccgacgtggctgatccccacgggctgggtgatccgagttagtaatgtcgtgtgggtaaagtgtaccccctctgcagaggttaacaaactgttcgaacagccgtgcccacggtcatgggcggatgtgaggtgattcctagcgtagtttggtttgactactgcttgtgaaattgctgtgtgaaaaggggggttcggtgtttgaaaaatctgcagctgatgagatcagctaggcccggatggccgtttgaaaagttgttggcccgggtggccgtttgaaaagttgttggcccgggtggccgtagaaaaagctgttggccgggtgccaaccttgtttaaattctaaagactgatacattgcacatactccgaccggacgagacgcactgtctcatccgtgtcgtttgagaagcactcacttagttgtttcagaaaagagttcaaataaaattaattgcaaaaacaccagcctttccttgaagcctgcattaaacacttacttcccatggcttgctgagtactcccgtactcacccttgctctatataaataatccccccccagttgctgaagaagatgaagcggatcctgctgatgaggagttcttccaggagcaagccggctacgatgagttttagggtttcggcctagttcccaagtcgcgcctgtgttgattggtccaagtcctggcttccgctttccttttgtaatgcagttgtgagctcgggatctgtctgcagcccaacatgactgtacatctactctataataaagagacatctgttgctgtgatattctgtctccctgtgataccagcactgtttcctgggactgatatcgattaacaggttaatttggagcgtcacgggctagtttcggtcgggactagttcggggcgtgacacaataccttaaaaaagtaacaaagtgtacatgcgccgtcattgccatgacactatcagttaagaccaaactacaagttttcaccgtgaggagtaattccagacaattccttcaataaaaaagcgaaagatgctatcgttggatacaaccagctaaaggctagatctaggaatcggtactcgataggtaccgcctaattaagtcacttaggaccggtgctccctcattttaccatggggagtaaagccgatatactttttttaagtcacttaggaccggtgctccctcattttaccatggggagtaaagccgatatacttttttcgggttgataatacttagtcttatacaagtgcacggtcttaaaaaaataagtttgaccattgtttttttattataatatgtataaaaatattaacaaatatatgattttattaaagtactttttaagactaatctatacatgtagtcaccatatttgaaagacaaatattttagaaatgattcataattaaatattctaaagtttgactttacctttttataaaatgacaagtattatcagtccggagggagtatactactgttaagtctgaattttgaatcccgatgagccaaatacatgatcacacaacgcttagttatctcgtagtgttacataccggcataatgtttctccaaggatatgatttacttcggttacatcttgtaggtaggtttgcctccactagaaaaacgtgcagtggggctgccatctccctgatttatcgcttcacgccttcacgtgctattttgctttgtcattttcctcaacaacatttcaaccctgttcgaccctggaatgcacattacatcattttatttgtaagatgaaaaaaaaatcgagctatcataaagagagtactgttcgaccctggaatgcacattacatcattttatttgtaagatgaaaaaaaaatcgagctatcataaagagagtaaaatgcgcagggagaaatagcttctgtgaaaggcagaaaaagcttatactttcccagcagatctcaggaaaggaccattggtcaaaaataaagattgggttcaagacaaacgatttcatggtttgccagatgatcaagagaaaagataattggtttgtcacaaaacaaaagccatcatatcacaaaaagtaaattcctcactaaatgcatataaccaacctaaactaatcaaaagtatccatacataccttttaagatagtagagtaaaaaattctccagcatatgcatcaagcaatgcatacggccctaataactagatatattcttttagataatattgtaagtacattatttagagcaatccttctccttggatcttaagttgggcgatgagaatatagcagatgacactcgaggttgctgactacgtcactgcgatcaagctcctcaagatcaaacatgttcttctctgtccagtcccaagaatcccagtccccaacttgaagagttgtttatctccaatgtggcagcattagtacctccaatctcctcaatattatctttaagattgaaggaaatgtttttaagggcataacaaaaccagaatggactaactttatggtgaacggtaataaataagtgatacatacggcaaatgtattcctggctgctgttctttttaaagttatacttgctgcacgtggagaactggccatagcgaaggaaccattgtggtgtcttctctcccatttcttgaaccattgcccaattgctctcggctaagtaacctgatagcaaagtgatggcctgaatggttgaatattggtgaggaagaaacaccaaacgattagctgtcagttcaagaaatcaattgtgaaaaaacaaatgagagcttgaataaattgttaatgtaaataccgattcagctaaaaactacgaccatgcacccactacctgaacaatcttcaatgattttgctgcttgcatgcaagcatcagttctcgattccagtcaggcatctgtaagttgaaactttaatgtttcaagtgtgcgtccagggagagaaaatacaatactccctccgtctccaatataagggattttgaccagatgtgacacatcctagtactacgaatctagatagggtaggatgtgtcatatctagctaaaatcccttatattttgggatgagggagtagaagggaatgggcaccttatataggatgaagcatgttggattacttgttcttttccctccaatgcaaggattctgaaatttatgatgcaattccttaattttgcagctgagtgaaccggtttttgtgcccagtcattgcatgaaattcaactaaaccaaaagttcatacaaactgatctacctgaatcctgctacactcaatcacaaattgactgtgcgtttaatcaatccgataaaattaatccaatgaatgaatctaaatcaatgctagggtttcaccccaatgctcgagtcaactacggaaatatcaaaatgaggacaatcaagggagagtaccttcctagacgatgtccacacgtcccacggaaaaacctttgatttcaggccaatttgagaaggatttgagaggagagagatgcgagatgggcagttgtgcgcttctgttcttcatgcaaagggaggagtccattcctgcaattagtttgctattagttatctcatgggcccatttgtaaagtaagaagttaaaaagggtcataatgtatagtttacacactataaagagtagcatgccgtccgcaggctcttcgctaacacatgccttgctccattaattcaatgaaactagaaccaggatgtttctttaacccacttaaattagctctggcccttgtattggtaaattcattccactgcccttcctgagcatacacttctgaaatcagagcataaatacctggtttctgtggtccatgctcaaggagctctttgctaatagcaagtgccagttgtgtatttctatgcgttctgcaagcagagatcaaaacacaaaatatagtggatttatccttcaaggtagatagctttataaatttgtatccatcttccagatgcccagcacgacccaataaatcaaccatgcaaccataatgctcttcctgtggaagaactgaatatactgaggtcatggaattgaacatacgccaaccatccttgacaagaccagcatggctgcaagcagtaagcacagtagagaatgttaactcatcaggctgaatgttttcttcttccatttgcttaaacatttcaagcatattaatatagaatccatgcatcgcataagcactgataattgcattccaagtatccaagtttctgtattccaaactaaagaacaaacctactgacaaatccagtcttccacatttggcatatgcacttatcaatgaatttgcagtaatcttatctttctctaacagggaacggtaaacaaaacaatggatttgttttagaccatttagatggccaagctcagagacagcttgaacagcagttacaagagacatggaatcaggtttctccccatgtttctgcatcaagtgaaataattgaaccacctcatctccatgtccatagggtaagcaacccttcatcatggctgtccatgaaaccaagcttttctgttccagtaaatcaaatataacccttgctgctgcaggttttccgcaaactgagtacatataaagaatatgattttcaacgtcaccatccgaacaaaacccatgcctaatcccaaatccatggatccacctccctctcactaaatctctttgatcagcaaaagcagcaagcagactaagaacagttgcaaaatctggaacaataccttctgccatcatgtaattgagtaaggaggtggcctcattggccatgccgttatgtaggtaaccgtacatcattgcattataggagactgcatctttaacaatcagttgattaaagagatgtcttgatatcgtgatttttttgcatttggagtacaccttaacaagagcagtcgccaaaacaacatccagaggtatatatcttcttattaagtaggtatgaatactagcagcatagccgaaatagcatacctcaacacaagcagaaatcacgtttgcgaaggtgacagaatctggagttattttatgctcatgcagcatcacagacaaatagtggattgcatcaaaactctgtccagctctagtaagaccagaaagcatagcattccatgaagctgcagttccctttgaattctgtaaagtagcaactgctgattgataagctccacatcgagtatacaagttcacaatgcaggtctctagaatataatctgagacaacaagtgctctccttatggaatagcaatggagtgatttgccctctttaagtgctcccaaattcccagctatttgcagtaagcttatcatagtcacacggtttacttccaagttgccctgcagcatatcaatggcaatatcaaatgcattccatgcaactgaatccacaatttctgaataaccagtgatcatcgaagtgtaagcaacaacgtccttgtcaatgatctctttaaacactccctgtgaatcgtccatcctatgaagcttggagtacaacacaatgagggaggaaccgatgaatttatccccagacagaccaaatttaagtgaatccacatgcattcctttacccaagtacagattctcaagctcagtgcagcttttcaaaacaaaagtaatagttttcccatccaaaccaatctggtgtaatttcaaccttttgtacaagataataacttcctctggataaccagctctaaaataatcaaccatggttgaattccacagggaaagctcatcatttacaattttctggaaaacaagtcttgactcagacagggcccctaaattagcataacaactcacaatcttagagccaagaatcacatcccagcacaatccatgtgtgaaaacatgacaatggatcttctttagagacctaatatctgcacagccttggaacaatggagcaaacttgtcaaaattaagtatcttattagagcatgaatttgcatcggcagtggatgctgatagtctccaacgcagcttcagcactgcaattttatcaaactttgaactagtgtttccagctaaattcccctcaaaagaattggtagcatcatcatggttgttgacgcaagaaaaacaaaaataggtaactaattgactccgaattcatagacatacgatgacagttcagttaaatgagcctacaatataatagtcccaagcacacatgtgtgagtcatgtgcaatgattacatcatgtgtgcttgggactattatattgtagactcatttaactgaactgtccaattgtggttggtgacatggttcaggagtctaacggtgtaccggaaacagatatagtgtatatctggaagtggagtctataaataggtccctaccctccagcctcataatgcattgtgagcggaacaacggaaaaggaatagagggtaggccggatagacccacgtaaacctaacaatatttgcttttcttgcacctccaaggatagactattcaactaaacctgatcaacagcggaacacatacaatcagtgtactttagtacaacagcactaaacttgatagcagatcacattaaattaagcgataatcccagttatggcatacacagcagaggagtgaagccacaatctctccaggacattgccacaggtaatgaatatgaaatactaccgcaatctcgccggtgctaccaaataaaccaccacctaatcagaacaaatagccacatcatcaagcagtcatcatgtaaaaacgagaaaatgggaaaactgaccaccagccgaaatctttttcagaggttcattccgtgaaagaaccggagtaggaggaggaggcctcggggtggccgccggcaagccgacctccggagggacggcgccaggaacagtggaggaggggcgcgcgcgtgggggaggcgcgggtggtgcggccgtgcgagggggcggcgctgccgctggctagtggagacatcggagttcggagcgaggagaggtggcgtggcgagacggtggggaatcgcgtgggcctttgcgcgtcccggagaaacggccgggtcgaaagcccacactaccattcggcttgggactagctatccatcacgcgacagatttttttttttccgaatcacacagattttatttttttttcaaatcacacagattttagattaattgaattaagctcatttgatcacttgattagaagagttatcaacatatattgcatatattttatttattagatctttatattgtaagaaaaaaatatcaccaacccatctactaaaagttacactgtgaagtgtaactatagtgtaattacagtgtaactatagtgtaattacggtacacttatatgccataccaaataaacttacaaatgtaattttagttatataggattgtaattttatattttaaaggaaataaaaaatacatatttacttacgtaatatttttaccaaacctacagtgcacttacatatcgtatcaactgaatttacgaatataattttagttatataggaatgtaattttctttaatctctttgcctagccgcatcgacgtgcgatgcgtgtactcatcaattatgtgccaaagctagatgttgctggcctcatgcgtgcgtgggaaggaaaggcatcacagccgctaattaaatcatacagagaataatccaagggaagcaaatccgagtgattttggggccgccagatgtttagcaaaatcgttcggctttgttggttgccttggttttctgactttctcatcgacacgatgtgattcacgttcaagggtagcatgtacaactacaagcaaatgagttctgtgctaagagagctaatatgaacaattagttcatcccagcttccgtagcatagtggtagtgcgttcgcttcgtaagcgaaaggtcgcgagttcgatcctcgccgggagctttattcatatgcatgttttccttttgccgatccatcatcaccgatccatcggcagcaatggctatgatatgcatgtatgcttttgccgatccatcactccgtccatcggcaatggctaatggtgccgatccatcactccgtccatcgggaaatggctatggtatgcaggtatgcaacgagctagccgacatgcatgttttctatttgccgatccatcactccatccgttcatcggcaatggctagctatgatatgcaagtatgcaacgagctagccgacatgcgagccaacgagcacaagtcgactacctctacctctagaaacgccattttgcaggaggatagctactggccaacgaacgcatggaccacctgctgtatgacagtatgatactatccccgtcgctctccggcaaactattttcctcggcagacaggataggtgcctcccaaatgctagcttaactaaattttgcgcatccttggtgcctgcttgctggtcctgcaccgtcgacccccccgtggccctcaaattcgtcctctgagctcgtcttgtaaagcatcagcgcggagaacgtatggtcatgaatgaaccgacatgaccagcaaatgggatcgggcaaaacgatacggccgtgtcccatacttgatgtgcagatatttttgtgacgtaactgctctcggagagcaggctgatcgagtgctaacgtgtaccgataagataggtgctggactaggaacaagattggattggagagcattggagtagaaactcccgtgcatcggccctacgtacttttgtgtcaaatttacggtgtcgtaattcaacttttctcttccttctctcatttttctccgtggatgcgtcattcgtgaaatgcttattggcaatcggttgctttttttcttttttcgttttcgcctccatgagactctgactgcaggaacgccggatgcatgcacacttcctagatatcagctggttataatttagaaattctatgaattggagacgaatcaatactagcgctttgaataactgttcatttttttcccaaactacacgtgaaaaatcttagccatctcggaaaggaaatacacaaacacgagcaggctcccatcggatgctctaattagtcgaagaaaaaaaaaggcaaaatttgagttttgaaacttaatttgagattgattttaagatatttttaacgtagttccttttaagcattggtttttaagtcacaacgaacacatatataaaagttttacatataaatttatttttattccctaataaaccgttttgcttactaggtaatactctctcctttccaaattaatcatcatataatataatttaaaatttctcaaattgatcattatataaccgcatgtacacggatttcatcataatataattaatgtagcaagagaaaatgtatgcatgctaaggtgtaattggcatgatgtttttattgatgcatgcattgtgagagaatatgagtatggtcttttaattgatgtaatttaaattattcttggtcttagtgtataaacatatcaatttcagaacagggagtattagcaaacgatggcactctactatttacgaggaacacagaagatgcatttttcgcttaaaagaagcacatgcgaaaaaatctcatatttccggaaatacgggggaaacactaataaaacgacagaaattgccagccgtgcatagccgccctgtaccgtttcactctagtactcgtggcaattgctactaccgcaggcacagctcatacgccggacacgcttccatgtgggcccatgaggcgcacagactccaacgtgcccatggaccaggtccaggatattttcggcggaatggctcgcttccctctcttctacaaaaagggcctcctagcaactgcagcaataatcagatcctccatcccgcggcggccgtgagcaccaacactcacgcattccttcctactccgcgagatctccggattcgtttcggtgttttgcgagtcgcgcccggagaagaggagaggaaatccggtcaatcgcggcgtcggcgtgccgtcgcttggggtggtgttggtggttctgaattttgattgcttcgtgcttttcgtttgggggagggcagtggtcgccatgggattggggaacgaggcgagctcgtcgtcgtcgcggctgctggatccggcgcctctgctgccgcaccacggtggagatggcgccgggaagctgtcgtcgcagcccaagaccttcgcgaacgtcttcatcgcggtggtcggcgccggcgtgctggggctgccgtacacgttctcgcggaccgggtgggcggcggggtccatcctcctgctctccgtcgcggcgctcaccttctactgcatgatgctgctcgtcgcctgccgccgccgcctcgccgacgagcacccgaagatcgcctcctttggggacttgggggacgccgtgttccgcggtccggggcgcctcgccgtggacaccatgctggtgctcagccaggccagcttctgcgtcgggtacctcatcttcatctcgaacaccatggcgcacctttaccccgtcttcgcgccctcctccaacgcgctcctctccccaaaggcgctcttcatctgggccatgctgccgttccagctcgggctcaactccatcaagacgctgacgctcctcgcgccgctcagcatcttcgccgatgtggttgacctcggcgccatgggcgtcgttctcggggaggacgtgtccgtctggctcgccaaaccaccacccgtcttcgccttcggcggcctgagcgcgatcctgtacggcatcggcgtgtccgtgtacgccttcgagggaatcggcatggtccttccgcttgaggcggaggccgccaacaagaagaagttcgggaccacgctcgggctatccatggggttcatcgccgtcatgtacggcctgttcggcgccatggggtacatcgctttcggcgacgccacgcgcgacatcatcaccaccaacctcgggaccgggtggctctcggccgccgtgcagctcgggctgtgcatcaacctcttcttcaccatgccggtgatgatgcaccccgtgtacgaggtcgccgagcggctgctccacggcaaacgctactgctggtggctgcggtggctgctcgtcctggccgtcggcctctcggccatgtacgtgcccaacttcaccgacttcctggcgctcgtcgggagcagcgtctgcgtcctgctcggcttcgtgctgccggcctcgttccacctcaaggtgttcggcgccgagatgtcctggtccggggtgctcagcgacgtcctgctcgtcctgctcggcctctcgctcgccgtcttcggcacctacacgtccctgctgcagatcttccattcctccagcgcttaatctctggagaatctttacggatagctgcgccgatgattgatttgctcatttgcttcgcgcgcgggtgtcagcctgtcaggtacgctggttgcattcttcgtgtacagagaaggtgatcggtcgatcagaggggcaatgcccaattcagcttgctgttgatttgggcatggacagcgtgcatcggccgcattctttcgattacaagtcagatggtttgtacaagttagcgtggatggcatggagaaatctgtatggttttgcaacgacagattcccatagctactcgtgtcagttaatatttatgtgtatgtcttggatgtttcagctgctgcattgcacggtggaatcgatgaaaggacatagtaagtttcagtctaagtttaagcctatttagttgataaataaagtgtctagttgaggttgcagcttgtgtgcggtactgcgggttgtgtcaattaggaaggcaagcaatcgggacgacttggcaaagtatacattctattctgttcattctgttttgtcccaagcaagtaaacttgtaatgccccaactaccaatcgaaatatcgaatcttctttcagcttgcctgttattaccaatgttgcacatataattctatcacgaaagaactcaaattagattcagacaagagcaaatcgcgtcctccatgtcgaaatatctgacgtcgtggaacatttcagagttacaattctcatctggcgttctgacgcaagaaaaagaaaaacgtaagcggactctcctcttttgctctgggcatctctacatttcctgatcaatcgttctccctaatcaggtgaagaatcctttattatcttttcccgtgtgcctttcccgttgtttttttctcgtctctcttcttatcctccagtgaccgtatatataagtactgagtaatgataagccaatgcgaccgtgccaagatgttactgtcatcggataaggtctagacgacgagccaattgatctgcatccgtgaacttgaggcggtgctctcacccaacatttccgtcgtttgttcggctgaggatgctccgcggctcacaagttgctcttttcttgggttcgtttcgttttcagggtggggtttcctggggccctttttttcatgatgatgtattgcaatttgcttctcttcctgacagcgacggcggtctgacgttaacgacatgttaattgtaggtatagctgtctccgatcgactcttcttttttctaagatgactgtgttccggtgactatcgcttccctggccgggtcgtgtggttcgattggcaggataaccgatacacacggctgttttttcatggcttatgttttcagagagggcgaagcacacggacacggcaaacctgcttcttagggattgtgatgctttaggttgcactgctaccgggctactgtccgtgtccggcccatctcttgcaggacaagcggttcgcttcgctctgattgtacgaggagaatatgggccgttgcttgacgctagatgggctgtcaacctggacttctcacgttaccagagttgggccaaattgtttggcgctgatgcgctacgtttgttaactgttgtccgatccgacccaatcctatcagtcgcagaaaaggaatgttcttatgttcaggcaatctctgagtctcgtcaacctaattaaccgcgtggttagcaggttaggtatcagtctgacccgcccgattactattttcttccctgtgttcttttcaggaatgttcctgagcaagagggtgacgaaaacacgaccatccatccagttggtttcacacttttcactggagcaccagctagacgcggagtccgcgtgtcgagcagacgagagattttgcacagttttatgctccaacacggcaagtttccggaatacagtggtgtactagtgctgtacaggtcttttcagcccaccactttgcttgcctccatttaagaaaggggcaagcgttccacgaattcgctgtaaaagcggacaaatcccacccgtggagagtaggacaaaagggcagaatcaccgtgccgagccaagtgcagacacgacacagcgtgacgccgcgggacgtctccgtttcctcacctagcacatggtgtcacctagtagtacgtgaggctagcgcccgctgtacctgtacgcgaccccgcgtgacggcgtgtggggtgggcacgaggaaacacctgccagtttcgggggtcgcggctcgtacgagccgcggcggcgggacggaggagataagcattggagcgtgatgatgtggtggaccatcaagcggcgccggcgaggcgagcgtgggaggggacgtgggtgggcaaagtccacaagaaagatacgacacgagacggggcgacgcggacgcaatcgctgggagccggtagccggcgaggcggtccggggtgcgtgtgtatcgtcgatccttatcctatcaccagccgcccacctataaatggcgtattaatttggccaccataaacccggcgttgagagcgacaactaaaacctcgtggaatgggggagccgccggggaagaccgggcgacgtgacgcgggcgggacggcgccggcggtggaagaccggtggacgcagctcccgccggagctcctcccgctcatctgcaagaagctgccggactcggccgacttcgtgcgcttccggacggtatgcagcgcgtggcgcgacgccgccccgttgtccgacgtcccgccgcagctgccgtgggtcgtcgagcgccgcgggtccgcgttccaggcgagggcccatttccgcttctactcgcctagctccgggaggacgtacggcgtccgtggctacggcggccgctcctggctcgtcatgggcggcgcgtgccaggagcacctcgtcaccaccgtggacctctccacgacggcgctgtacaacccgctcaccggggagcgcctcgcgctgccccccgcgccgtacccgcagtggcgccacggcgtcgtccacgtcgtggccgccggccgccgccgcggcggcgctcccctggtggtgaacgcatccacgaggacggggcacttcgggtactgccgccagggggataccaagtggaccctggtcgacgggcgccaggacatgggccaccgcgcgtaccacggcgggcggttctacgtcaacacaaacgcgcaggagacgctggtgatcgacgcctccaccggcgccgtcgagtccgtcctgccgccgccgccacgctcggccgacgccggtgccggcgtctcctgcggggactacctggtggagtcgcgcgggaagctgatcagggccgtgctgttcccgcgcgacggcgtggtgaccacgtcggccgaggactactacctcaacgtgtatcagctgcaggaggacgggaaggccgccgccgcgtgggccaaggtggagagcgtcggggatagcgtgctctttttcgacaagcacgggcacgggttctcgctggagcccaacggcgccgcggagctgaagcgggattgcgtctacttcatgcacgagaagcggacatggctggacgccggggagtacaggttcctttgtcggtataacatggagaccggagaggtcgatagagttgtgtcgctgcccgacacgttcggggacacctgggttgtccccggattgtgcccctctgaataagatgtgtcccggcgatgttgttggtttttcggtgtttcttgtagttttttctccttgaattttcattgaaaaattaaatagatgcatttagttgctctgggtgaatgattggtctttgaaaaatgagagaggtcttgggttgtgtgtgtcacacaatcacatgcattttccattatgtttaataaaatttaatttgtgtgtctaactttttgtggctttaacatatttttattggtctgataaaaaaaatgatgtttgcaaatagtggtggtcgtggtataaaaaacaacttttttatggtgcacatttttaccaaacaaattatagctcgtgtacttaccatgttttatctgtgagctagttgagaaaatataatttgtgtcatgcttttaaagatatttcacttcacacacatgaatctgtcaaaagtgctagtgttgttagtgtgacaacttacctatcagttcattactccctctgtttcacaatgtaaatcattttagcatttcccacattcatattgatgttaatgaatctagacatatatatccatctagattcattaacatcaatatgaatatgaaaaatgctagaatgacttacattgtaaaaccgaggaagtaataagctaatcccaagaaagcaaataactttcgtgtatattcgatcggttcatattatacttaggctcatacaatgtatcgaccaattatattgttggtgttgtagtagaaatatgtttctgtcagtttcactttgcttgtgttgttcgtggtatcaacctagctattttgtgttggtattatagcaaaaatatgtttttaccaattttgctttacatgtgttgtttctttgtactgaacccacgtgccaatgcattctactagaatgtgatgaagaaatttcaatatcatgaataggtttctctcacaatacatcaatgtgtactaactagaggaacacaggaaggccaccacggtgtgggccaaggtggggagcattgaggaccgcgtgctattcctagacaagtaggggcatgggttctcgctagagcccaacggcgcgtcgggactaaggcaggattgcgtctactttatgcatggacgtggctggattccgaggagtacaagttcctttatcggtatagcatggaggacagaaaggttgatagagttgtgtcgctagtccacacgtttagggacacctgggttgtccctagattgtgtccctccaaataagatgcgtcccgacagcgtcgttggtttttgcggtgctccttgtagttttttctccttgaatttccattcaaaaattaggaggatgtgcttagttgctccgggtgaatgattgtcctaacaaacatggataaattttgggttttgtgtgtcacacaacaataagcatcaaattacatgtatttcccattgtgttgaataaaatttgatttgtgtgtctttttttgcagtattaacatatttccattgattcgagaaaaaaattattagtataaatgtttacatatcggtcatggtacgtaggatgctatcttagaaactactactataaaataactttatggtgcacatttttaccaaaaaattatagcacgtatactcaccatgttttatgtctatgctaattgagaaaaaaatattttttgcgtcatgcttttaaagatatttcacttccgcacacatgaatttgtcaaaagtgctagtgttgttgtttttttttgaaagcttacctttcagtccattattaagctaatcaaaataaaacaaacaacttttgtgtgtattctgttcatggtatacttaggctgatacgatgtatcggccgattgtattgttggtgttgtagtaagaaacatgtgtttcatcggtttcactttgcttgtgttgtttctggtatcaacttagctattgtgtgttggtattataactaaaatatgtttttatcgattttacattacatgtgttgtttctttgtactgaacccacatgccaacgcatcctaccggaatgtgaaaacgttttaatatcatgaatatgttcctctcacaatacatcaacgtgtaccagctagaggagcacgagaaggccgccaccagtgtgggccaaggtggagtgcattggggagtgcgtgctcttctttgacaagtaggggcatgggtttgcgctggagcccaatgacgcgtcggggccaaggtgggattgtgtctactttatgcatgagaagcggacatggctggatgccgggaagtacaggttcctctgtcggtatagcatggaggacggaaaggttgatagagtcgtgtctttgcctgacacatttagggacacctaggttgtcctcggattgtgctcctctgaataagacgcgtcttggcggcatcattggtttttgcggtgctccttgtagtttttctctccaaatttcaattaaaaaattaggtggatgtgcttaattgcttcgagtagacgattagcctgagaaacaaggagaggcattggttttctatttcagacgacaataagcaccaaattacaagtgtttccttttatgtttaataaaatttgttttctgtgtctagtttttctgtggcgttaacatacttctgttaatttgttaaaaagaatatcatcattaatgtctgaaaatagtagagtagttacggtagggtgccatcttagaaactactactagaaaataacttttctacggtgcacatttttaccaaacaaattatagctcgtgtacctaccatgttttgtctatgctacttaagaaaaaataatttatgtgtcatgctttcaaagatatgcaattttcgcacacatgaatttgccgaaagtgctagtgttgttattgtgataacttacctttcggtccattattatgctaattgaaagaaagtaaaacattttgtgtgtatttcgctcatggtatacttaggttcatacaatatatcgaccaattgtattgtttttgtggtagtaagaaacatgttattatcggtttcactttgcttgtgttgtttttggtattaacctatctattgtgttgttggtattatagcaaaaatatgtttttttaatcgatttcactttacttgtgttgttcctttgtactgaacccaggtgtcaatgcatccaactggaatgtgacaaggttataatatcaggaataggttcctctcacaatacatcaatgtgtacgagctagaggagcacgaggaggccgccacgatgtgggccaaggtggagagcgttagggtccgcatgctcttctttgacaagtacatgcatgggttctcgctggagcccaacgacacttccgaactgaggtgagattgtgtctacattatgcactagaagcggacgtggttagttggcgggaagtataggttcctttaatttgttggtatagcatggaggacaaaaaggtcaatagagtcatgccgctgcccaacacgttcagggacacctaggttgtccccggattgtgcccctctgaataagacacgtcccgagggcaccattggtttctgcggtgtcccttgtagttgttttcttcgaattttgattgaaaaattaggtggatgtgcttaattgctccgggtggatgattagcaaagaaataaggaaatgcatttggttttctgtgtaaaaaaacaataagaaccaaattacttgtgtttccttttctgtttaataaatttgatttccttgtctagtttatcaaattttatcatgtatggaaggtttttgttttgttttgaatcaaggaacacaccacgaaaaatactattttagttaatggcaccagcatgtcgtgctgtttgaaaatttggagcatttgacatgtcacggagaccatcctctcatggcacacctatctctagagcgtgtaccgtatcacaaaattagtgtttgtggaaaaaaaaatgcatcacaacatattgccttttttttcctcgtgatgtggcatgctcacttgtgttgacatgtatatttgaaaatgacaatagttttggtatgcctatgatgcaataccatgctcgtggtgttacagatgtatcaaacaactaaacatatgctagacaaatgtcatgacaccacactatgttttgcctcgtgtgaatcttgattaaatgtgaccgtcacagacttggggtcctacatacaaaaaaatgcgcatgattagagttaaggcaccgggtctctttcccccgactcaccaaaagatatttcgtgggacgacgtgtgaatggacgataagaagttggcatatggggttgcccaggggatgacgctcacaaacatccccgggttccaaggggcacgacatccctgatcgaggttagacacatggccaggagagttggaggctgtccctggctaagccaggactggtcgcatagcgtgccctactaggctaaagcagggctgagagagccatgctggagctctatgggccccacaccccgttgtaaccaaaagcacggaatctatgtgccttgtcgctgtaaccaatagtgacatcacactatggacaacatgtcaaagtgccttaatgaaggtagatttaagaaatcgtgcgagtctctctctctctctctgtgtgtgtgtgcgtgcgcacgcgcgcacgcgagcgctcgtgcatgtgtgcgcgcgcatccactgctcactacgccgtccaattagagggtagttgggttgtcccattgccaaaaccagagaaggatgacatgagtcacagttggcaaagcaagcgtgatgacggctggagaagacgaacaagagcagggagatttagggttcatatactcgatcgaccaatccatcttaaaaaagaaagataagagtagggttgttatcctctgagagactcaaacctaggtaaatcatcgttttgcagtaagaattctgccaagcctcaaccgtaagccccgccaaacgccaaagtatgcagggttcaccggattatggtctatttggccttgcccattgacagaatgattacgtgaaaatgtccccacattaaattttttttgcttgccttatgttcatatcacatttttttagtcacaagaattgcaagttatctaccacactattgataagaaatgttatgatatattgcaagtagcatgcttgtgagtgatatagaaaaaccaaaatcattggcttgtcaaggaattcttatcgatgagtgataagttcatgtagatcccaaattatcttgttgtaaggatgcatcacaaccaatttttcctttacttctggtgcatccgagtacatgctcttttttcttgggcattaaccaaagcgtatttgcaatataaagaaaagcggcataataaatgaacttggtcatgttgtaacctacatgatcttttgttgatgtgtaaattgcaaagtttttgttttgaggaacgtaatgatgaattgaccacttgagaatatatgtattggtttgacaaatgtaactggtttgtctatcgccactttttgttaaaaacatatgctaacttgaatagtgatgaataaaatcatccaccaattttatgagatatcctataaggaatcatccatcttaaatgggttgattccttagaccaaacaatctattcatggacccgtaggaacctacaatgttggtcttatacagtaaaaaaagataatattagcaagttactcattgcttgcctacatgcttgtggtgctttagaaaacaagagcatgccctctgatgataaaacctgtgtcactggtagatgaaacatttacatagaacaaacaaatctgaacattttgctggagcctaatataataggttagtagaagtgaaagcaacaaagaattgttaagcacaacaaaaaaaacacaattaagtaggaagtagaaactggcataccctgattgcatttattgtgtgtgttgatcgagcatggcggtcgggttcatactgtcagccccagtgactccaagcaaatcgatcaccaacataacccgtgcacattgacctcctacgtgcagtctaaataggtgggagagcaagggaggcagttggctaacaccacgctagcatgcctatgtaggagcaagtgactggtgataatggtgactggtatggcagccctagcaaaaatcacgtatccacacaactgttagcggcacaactatcaatgagtatataaagagaagatgtagttctggatggtacaataacatgcaacggaggattgtagggcaaccgtggagagagaagagcgctgtggcggtggagggtcgtggggccgaggacggacacggcaggaatccccaatccctatctatctatctattatattattaaaacagctttgaaagaaaggcatcacgttcgctgtgggggctaaaaattcccacattaatcggagaaaaagaaatgaagagtctaagtagaaatataattcaaaaatagctgaaattcggaatcaaaatgagcaatattgaaagaagagtcaatataagaactcaatacgagattaattcatacttagaataacaataaaataaaatccgaaattagaaaaataaaggagagtccaaataggaatacaatttaaaaataactgaaattcggaattaaaaataaggaatattgagaaaagagtccatacaagaacccaatacgagattagttaatattcggagtaaaaataaaaataaaatatgaaattagcaaaaagaaaagagagattagttaatattcggaataagaatataaataaaatctgaaattagcaaaaaagaaaagaagagttcaagtaagaatacaatttaaaattaactgaaatttggaattaaaaataagcaatattaaaagaagaatccatatcagaacccgatacgatattaattaaaatttagaacaaaaataaaataatatccaaaattacaaaaaataaagagagttaagttggaatacatctttgaaacaactgaaatttaaaaataaaaaaaatagtagaacactatacggtattaattaaaatttgaaaaaaaaagaaattctgcaattagaaaaagaaaaaaaatcaattaggaatacaatttataaataactaaaattggtgataaaaataaatactattgaaagaaagaccatctaaaatacatgacgagataaattaagtaacaggcctataaaggagtacagtggtggcggttgatacgacatataaaaattgttaatagaacaccaaataaaatcctaattatgattaaaaggagggacgataagtaggccatgaagcaaacgggtaaggcggttgccgggacttctagaaagtaaaaaaaaccattaataatcatattcgatttttaaaatctcaatgataataaaaaggagaagcactgggcggggtgttataggatcaaggaggccgactagagggggggtgaataggcggtttttcaaacttttggctaaaaccgagttttatatgcggaagcgtaaatcaaaatggttttgcacaattcaaaacctaaatcaactcgtctcaagtaagtgcacaaagaagctagtctatgttgaggtttgcaagcctagggtgataatagcacaaataaagtctagtatgtaaacttgctcaaagtaaatttgcacaaaataaaggagacaagagacaaggaattttcaccgaggttcggaaactcgccggtttcctaatccccgttgaggcgagcccaactctaccgctccaccacgaagccaccacacgcccctttcgtcaaggggtgggcaaggcgggggccggcccacggagaggactaccaaagccttgatcactagggtaattcttccttcactccgaaggtggtgaactccaaaccactcacaaccggcgccgggcctcctccacaatctcctcggagaggttaccgggcaacacctccacaagccgtctaggaggcggcaacctccaagagtaacaagtctaggatgcttgccgaggatgatcaagtgccacactagctataacaatgaagcaatgcacttggattggcttaactcactctttaacacctcactagataaactaagtgcacaagggtgtgagagctcttgcaagggttcaagataatgcaatggagtgccaaaatcttgcccttgctgctggggagtggatatatatataccccaaccaccaaaactagccgttggagtcgaaatccccaactttgtgctctaccggtcagaccgccatagagtggcatgtcagaccggactactctgtaacggctagaaaactagacgttacagggcaatcattgagcccactcaacttggccggtcagaccgcagtgaagtggccggtcagaccgtccacggctcggtctaaccggttgcggctctggcggctttgtatcgccaccaaaaaccaggccagtgcaatagaccagtagggccggtcagaccagccttaccacgccggtcagaccggctaatagccccggtcagaccgacctaaggtccacggtcagaccgcaggtcacttttcagcacaaccaaccgttagtaaaacgacgatatctcttgactcggatctcagaatttggcgttctcggactctatggaaagcttattcaaagggctatctaacccatgaacaatccatccaagaaacacaacttttctcagggagaaatggctcacactccaaaggatactccaccggacataaccacatgaggctacccaaacctataggacgtgcccacttctctctttgtttgggacttgataaaactcaccacacttggctagacaagcccacaaaatgcacctatatgcatatgaactaatatggcacaaaatcatccacatgctcgcttcatagacccctcttgatagtacggcacctatctagtaaatccggtctacaccaaacaccaagaccgggaaaaagactaagaaaacattcttagctccattatacctttgccttgcgccatccaacttggggtcaatgcttgagccaacatcaacacttgtgaccattcggttgaaccatgtttatgccgaggtctttaccatcctttgtcaagactttattctcatcacaagcttgacttcattcttgccaacatgacaatgtccttggcttggtgaccattaacccatggtgtcattcattagcctcatcgcaattagatctattcctttgcacggctcaaaggaaaacattaatcccaacaaattggttggcatcctccacttggtgaccaaccggttgcatatgaaagatatggatatgtttgttgagtattcattaacatcataagtgtcatatactcgtatgcaagctcaagtgcaaagatccgatatatataataggtgaacaacatggatctaaaacatgcacaataaatgtataggatttgctccccctaagtatatgcatacaaagaaatatacaagagagacaagtgtatgcataagtaaagaagaaccaatgggggtttatcctatacacatagagaaggcatatgtagtaatgatgaagataaacaaaaaaacacataccttcatgatctccatgttctcaatgtaaaggagactaaataagataagactcaagtaaacattagtctcacacttatataacaataacatggaaatcatatatatgaacctatcaaaaagtaggagataagaagtgatacatatcgctttatctccatgaatttcatccttgtcataattaaggtccatcaccaaagaatgcatatctaccacatctcattatcgggaaataaccttgttgaaaacttatgtaaaagagaggttaatcccataaacatcggtttatcatctatcaccaaagtaacaattacacaaattgtttaatccaagatcttttaatcttttctctcttttgtgatagataataatccgatataaataatacaaagagatgagatgaaagataatttcaaatcaaggtagagatcttataatgaataaaatatagaataagctccccctcaagatgtgcatacatatggatatgaaggaatgcatatgcacataatcaatcaagatcaatgagggagctcacactatattttggatccacaagagagaccaagttagaatatgtgaagtttaatacatacctcccatcatttttactttcatatccaaataagactagtcaaagaaaggctcataaaaatgttagtctcatataattagatttgtcattaatcaccgaaaccaaattaaggcacttgaacttacaggtgtataggagtatagttgcagagccgccgacggttggcaagacttctagaaaataaaaaatgaattccaacgatagttatgctcgatttttagaattccaatgacgataaagagtagccggcggataggttgtagaggagtatagtggcatcgtttgaagtgacttctaaaaattataaaaaataaaactcagcaagacaataaactctaaaaactaaaaggtccaaattttaaaggtttagaacttcttaaaaagtaaaaaaaacaatgaaaatcatgttcgattttgaaatctcaatgacaacaaagaagggaggcagcgggagagccatagctgctgacggtttggcgagacttctagaaagtaaaattgaacctgaacgataattatgttcgatttttaaaatcccaataacaataaagagaaaagatagtggatgggccgtagaggagtataatggcagcgtttgacgggacctctagaaattataaaaagaaacccaataagacaataaactctaaaaaactataagatctaacttttaaaagtcccgaggagaatgaatagaaatagtggtagatcgagtaagcaaataaagaaaacatgaggatgataaggtttgatcttttaaagtcttaagataacgagatagctatttaataaattataagtaaaatcatacttaaaaaaatatatgattttgtttgggttctagccgcgtaattgcgtaggccacccagctagtttagtgaaagtcagagttttaaatagggattgtgtgaggggatgaggattgaggaatcaagacctaagtagagaggagccggcaaccggaatgggtatggttaacagattggaaagaacgactcaattgaggtgagcaaggaaatccgactgctgttagcgtgaggcaacaataatgtatagtgttggagggttgtttttgtgaccgtaaaaactgggttttatatgatgtgagaggttccacatgttttagaggtgttcttcttgttataaattaacgaatttgttatatcatgacaaatgcctcctttctcattttaatttctcggtgtattgctggtgcaaatgtgtgaaaacgcgaaaggaattcccggtattgccctacagaaagaaaaaagagtgatgtacaatcattatcgtgtgcaagaacaatacgaccctatttagatccgacttcgatgtgaagttcttcagacttccgctgaaatttctgcgttatccaaaacgggcccaagcggaaagaggcaaacagaacaggcctttgtttcctacgatcagaggaagaaaactgcgggacaactcttgcaaggagtacgtgtacgtcatcgccatctggaaggcccaaaaggaaagcgcatgtggctcaccgcgaggcctccacgaggacgccgaacccaaacacaagccaatctggctctgccagcccatcgccacgatgccccgaagcacgcacacacagatgggcggcacacggtcacacacaacctcacgccgtttgctgcaggagaggggaggagccggccaccgaacccgagcccccaaagcgcacgccagtacgccacccgcccaccccgcgacgcctcggggcggccacggaggcgaagccaccagcgtgttcttgttccctcccgccgacggcgcagcgcgcgccacgtcttcccaccccccccccccccccccacacgccgagtccccaactcgcgaataaatcggcgagggcggttactgcgatcccttcaccgcccaacgccattccgaaccaggttcgtcgtcgccatggccgcaacgggctggtccgacctgccgtcggagctcctctccgagatcgccggcggcctcgtcgagctgggggacatcgcgcggttccggtcggtctgctcctcctggcgcgcggcggcgggtggggcggcggccgctcccccgccgcagccgccgtggctgcttctcccgtcctccccctccaggctcttcttctgcccgcgggaggaccgcctctacccggacctgcggatgcccgccctcacggcggaggcccaccgccgccgccgccgccgcctctacgcctccccgcacgggtggacgctcgccatcgaccccaccgacctcgccgcgtcgctcctccaccccttcaccggcgccgtctgcgccctcccgccgctcccggccttcttcgccgagacggacgacctggcctgggactggtcgccgcacggcgtcatggcgtcctgcggcgagggactcctcttctacgcctccgacccgcccgccgccgcctgggccccgatccccgccatggccgactgcaacgcgagcagcatcaactactccggcggcgagttcttcgtcttcgaggaggacgtctgccgcacaaccatcgtcgacgccctcaccctcgccatcgcggccgtcatcccggcgcccgccgtcgagctcccctccgaggcgcgcatcgcggtggccggcgacgagctcttccttctcgtcaagtccaagtggatgtacctcttcggcgacgacatcgacttctccaaggtctttcgggtggatcaccgcagcgttgactcggcctggcaggagctcaccggcatcggcggccgcgccctgttcgtcgattccctccacgggttcgccatggagaccgcgggattcgagaacctcgagggcaacaccatctactccgtgaccaccaaggaggtgaatgatcggcgttccaccacggtgaagtatagcgtgtcggtgttcagcctggagcaccggagctccaagaagctcgcgtgccgcctcaacaagctggagatggccctccgcggcgagacgccttcctggatcataccaagcttgaacgaaggatgaacggaatcagagattgccggattggtggttcttgaagcattcgtgatcgacaaatctctgcctcggtctcggtaaattcttcgttacccttgcagttgcatcagcagggtgttcagcaaagttggaaatcaataattctgtttaatatcttgttctttgtttattttttattttgtacatcttgtccattaaaatatctttatttctgaaactatatcacccacgaagcttagtttcctcagttgtatttgttgggaacttttaagtttcgatgtccactgtcaatgttgcccttgaataaaggtttatgtctttgttatattaaagttgagttgcttcagttcatacatatggctcctggaaaaaatttataacggattttttttatggatatacccaaataattgacatggatatacatgacgttatggatttttttggtcaacttctgtaatatcagtgtctgccaaggtgatatcaatttgcatcaagttgatggcacatttcgccaataggtgcgggaggccgcaaatgtgtggcctactggccttggttgtgctcaaacgtctgaatttgtggtgaagcttttgtgatgtgattgctcgagtacaagcagtgatagcccatctgcggatgaaatcgtcctgaaatggatgtgcaattcctgattcctgtacgtggggcaaagagctgacagcaaaataaggagatagagaaaaggatgataaggagattacgcatgggcggcagggaaaataattatgggatcagttatgtgcggcgatgaacaaagcatcaaattctctgaaatcctttacccttcctcctcaatcttctcttcttcatcgataaatctaagtgaagaatcagtatgcatagccgtggctgactcgtccatgatagcggtagctggaaagagatgctgaattatgaagaaaccctgttgctggaataagcaggtgttcatttatttagtgcatttgcggttgcttgatgtaattaagaaataaaaatgtgggtctcgttcggtttgcaacgccctgaaccgaggcaagtacccgtaaacatcagtgttgtccacaaggaaaaggagctgaagacgactgctgcatctcttgtcctcgggccttccggggcactccaaaacacctaccttttggattctgtagtctgatacgcaaggttctctgatgtttcagctcgcaacatttctcgatgacgaaaccgtggtccaaccatcaaagtactaacatgcctgaatccatgtatttttcatggactgggccagataacaagaagctcacttattaaggcttcttttaacagaatcagccccagaaatattgggcgtggtccaagaatttgggccatttgagaatcatggatgggccctacactccaggggaagcgtacatttaattctttttcgcgaacgcatcgtacatttaatttaactttgatttgataatgttccaccatgagtcccagacccgcacacattaatgaacttgaactagcgctagcctcgacggctctagcgaaaggcggcgatcgactcagacgaaaaaaaaaactttgggcctgtttggttttttaccctactaaatcttcagtagcgtcaaacttttgatatattttagtactaccaattctttgttagcgtacaaatgcatggtacatatttaaattgctaccaatataaaatcaaatattgatgatatagagaagaaagttctagattagtgtccaattgttaatgggcattactaatgatttggcttcaatccaaacatacaatattattattcaagatacaaataaattggtgaagttacattttggcttcaataaaaaatagcccttcaatctccctgccactttccttcttttccagcggcttcctgattatcggccttgggggttagatttagtcggatatctcctattctttatttattttaaaagagtcacccttctctctccggcggcatcctggtcgttgttgtgggaggagggttcggtcccttctccactaataaaaatagtttagatttagtcaggtctatcctgttctttatgtagttcaaaagagttgctggtgttcgactcttttttctcaacttgatggacatggccgatctcatcggtgttcttgttcagtaaacactgggttcaccttcaatgccttcaatccggagttttgttattttgcttagaattgaaggacgaaggcttgtcctctaactcgttgaacagaaggttgtgtaggctgtttgctccatctaccacacttacgatggtcatatgccccgtctcctacatcagttttgcaaaaggtgacggatgatttcttctatgggttaaggtggcttcaatctctgtcaggagactagtctagggtatgctcatcgactctaccaattgcacctaaccatggtttttctgcttctaccgtcgctgtgcgtgaggatcggcgcatcgttgatgtggtcgttgtaaggatctagttatttttctgtatccttttaattaggtctttctttgcgtatgctatgtttgaagtgtaatttgaccatcacttaggggcttttatgcaaaactagctatcaatgtactttatcctcaatcaataaaacacaataacaaaaaaagagctagatctggtgccgtactaaagtagtaatagaagtgtcagcaactcaagtcgatttttcagatcattaatatccgcagcacacattacaaatcagcaagctttagcaaacaaattacatgctaattcagaaacacaaagcaccgcaccacatatagaataattaagcagacgactcgcctcccctatgtaacctggacgagccgcgcgtcgtacgtgcgccacaccctacataccgattagaagaaactcgcagctaacactacctttgtttggggagctggagaccccctattctcttccggtttctgagaatcattagccgcagagtccagaaaatgaactaatataataactaaaagctggacttattagtttctctggaatctcactatctgaatactcattagctgtcttagaatcttcagctctccaaacaaattgcatttcagttagatgtcaccggtacaggcagccccggtacgccggcgtccagtagtccatcgcgttgccatcccggtacacttcgggcgtccacgagacaggcaccaagcaaagccccctattcctcaggtcatgctccatcgtctctcccttgctcgcttctgcttgatctccccatggaacgctgttaccctgaaatcaaacatttcaccacacacagcttgtgattattagcctcacagtactggttctgaatttctgattattagctagcctgtcggctacaagagattctgaagcttaatcaatcatgtacctgcttgttgctcctgctggagttcgtgtacggctcacttagcaactgcacacatagtataagaaaaggaagatgagaggaaggataatcagcacggcttgagagctcaaaaggggtcgttttgcgaaatgattgcaacatgcatgctgatgctgtatacacgtactgtccttttctcatgttttcgtggctgttgagaggcagtacaagttgagaaacattctctactttgctcttgggtgtgactaggaagcccactgacgaaagggagcactaccgggtcaatttttcatatatggaaccagctaaacagtcactgcaaatgatccattgcatctctgaagataccacacgcgaggatttgtgtgtgtatgtacgctgctcacctgtagtacacttccgttttactactaatgtcacggtggtcacaaaaatcatgtgcttttctggaagatttatagctaggtcaaaatataggagctagtacctaacctttttaatccgtgaggtcaaggacctgctatcaggagatagggagattaaattcatcgagggccataggagccaaaacagtattagccatattttagtaaataaggcttggtgcgagtctgtttcggagctctggcctgaaaattcttgtaacttaatttgtctcagatatggtgtgtgaggaagcttctcatgagtaatatattccttatttccccgaaaaaaaaatataggagctaatacataatttgcatgtcgggatggttgcaggaacggaattttacctgtacttgttcgtgcagaaacttgatatacttgatcgtttcaaacagtaccgatgctgtatccgtctggtcatgtggtgcaatgcatagggagctgagttagattatacagaagaattgcagtttcacactatttgcagaagaaaaatcaatgtagtaattgcagacatatgtaacctacataccttcccaaacggcgaaacgatttgctgaagtgctgtgatcttctcccctagctttactttaggcactggttgctgcatttggttccaaattaaaacgatcagttcgttcaaatactgaatatatggtcggacgatttcagagataatatcaaatactccatttgtcttctatgtgttgttaccttaggaggtgatgctttggaagcctcttgcttggacttcttgacagtgctttcctgcctttcctctgacttcctcttcttacgatcagtcgccgccgctccactgccgctgctactactccttgcctgaaacgagataattaattagcacaacgccacaaacatgattcaaaatccacgcgcacatatgcagatacaaaactgcatatattcagttatttagtactacgtactacaagcaggcgttttagtactacgtataggactactttgcacttattcagttattctcactggcctatttatgttgggggtatgaaatggcacgtgaatcttaccgggacagtctcctgttcttgtcgattgctgtcagacgaattggcgcatctcatgtacggttgcaccgacgtcgactcgatggccggcgtgtagccggcgaatgacccaagatccggcaagctcctcatgccaaaaggactagcctccatttcccggccgtcctggcagcaaatcttgtcaggctgatctcctaagcctgaataatccaggctactgttgtgcacgccaacgctagcactgccggagcttatttgctgcagaaatgaggccatggggctaatcgcaagctcgtgctgctcctgctgctgatggttgcagctgccttccttcgtcagctgatgatggtggtggtggtggtgttcgccgtagcatgctggcgtgctactcatcatggtcatgtcctggacctggaggacggtgttagtgccacccaagtacagcggcgagccggcgatctcgtacttgatcggcgagacgtcggagcgagcatgatgatcgaacgaccgtgccgtcgtcgtcagggtcgtccccgcgggtgcgacattgtagtgctcggaggcggggacttcctcgaacatttccggcgtcacgttcttcgacgcgagcagatcgaggaagttctccctgtagccgccgccggtggtgctgttgcttctgaaaggaggaattcaccggcgttggaattgcgatcatttacacaaagcatgaaatatatagagctagacagagctgttaattagaggactcacagttcgccgtggctccagccgtgtccgtgggcgtgctcgccggcagccgggagacgcatgacgtcggtcgacgacgaggaggagtcggcggcgaaggccgagccggcgagcgccgtcgacccggagtaggggctccagtaactgtagggaaaagaggacgagggctgcaaggccgcgtgcgtcgacagctggtgatgatactcccacatggtggcggcggcggcggccggcgaagtggaggcgctgcacgcggtagccgagtcggcctggtggtggtcggcggcggcggcggcggtggctccctgctggggcatgaaatactggagttgcactgcgccggcgtgcagacgcatcgcatgggttcggagctgaggattggaatgtggagtggaccaaagttggtgctggggcctatttgtaggcgcttggaatattttccggtggggttatcgaggaggatatgtgcttacgtcggcgtgatgcaagcatgctgcaagacatcattgatgagtttttttttttttgcttcttttcttttcaatttataatatgcacgctatgaagcagccatagttaaaatgcgttagtgtaagcatataatttttatagctaacttgtatagggtagcgaccctgtcctttctcagaagtatacctttttttcttttttttgcaaatcttgaagcaatctggttgttggtggtggtacttctgaatttgaaagtgctacttgaagggcctttcaatcagtctacttgagaattgagatgttatgtggttcatcctgggaggttcaatttactacctatccattcgttagctagctggagtatcaatgagtaaaattcaccggcagttcttaaactaattgcattgtcatatatgtccctacacttcaaaaatacaaatcaaggtctcaaaactcgttaaaagtatgtcatctagatccaaaactcttcaggtgcttgcatggttgattgacatttcactctcttaatgacactcaaaaggtgtatgtgacagtttcacgtcagcaccatgtggacttgaaggggtatgcggagttttggacatagatgacatacttaacaagtggcccggaacttgcttgctatgcattttgaaggggccaaaatgacatagcatggtaagttttaaggaccgtcactatactttatgagtttacattcacgaacgctttacttgacaacttattggattggatttaattctatgccaggtaatggtttgaggacgacaagagagttttgggattctaaaatctatctattatattattaagacagctcgacaaggaggcaccacgtttgttgtggaggctagaaattcccacattaatcggagaaaaagagaaaaagaaaaggagagtccaaataggaatacaatctaaaaataggtgaaattcggaattaaaaataagcaatattaaaagaagtttccatatacgaacccaatatgagattaatcaaaattcgaaataaaaataaaataaaatccaaaattagaaaaggaaaggagaatccaagtaggaatacaatctaaaaatagctgaaattcgaaattaaaaataagcaatattgaaagaagtttccatataaaaacccaatacaagattaatcaaaattcgaaataaaaaaataaaatccaaaattataaaaggaaaggagagttcaagtagcaatacaatctaaaaatagctgaaattcgaaattaaaaataagcaatattgaagaagtttccatataataacccaatacgagattaatcaaaattcaaaataaaaataaaataaaatccaagattagaaaaggaaaggagagtccaagtaggaatacaatctaaaaatggctgaaattcggaattaaaaataagcaatattgaaagaagtttccatataagaacccaacacgagattaatcaaaattcgaaataaaaaaaataaaatccaaaattagaaaaggaaaggagagtccaagtagcaatacaatttaaaaatagctgaaattcgaaattaaaaataagcaatattgaagaagtttccatataagaacccaatacgagattaatcaaaattcgaaataaaaataaaataaaatataaaattagaaaaggaaaggagagttcaagtagatatacaatttaaaaataactgaaattcagaattaaaaataagcaatattgaaataagtttccatataagaacccaatacgagattaatcaaaatttgaaataaaaataaaataaaatccaaaattagaaaaggaaagaagagtccaagtaggaatacaaattaaaaatatctgaaattagaaattaaaaataaagaatattagcaaaagaaaataaaaaaagagttcaagtgggaatacaatttaaaattagctgaaattcggaattaaaattaagcaatattaaaagaaaaatccatataagaacccaatacgagattaattaaaatttcgaataaaaaataaaataatatccaaaattagaaaaattaaaagagagttcaagtatgaatacaatttttaaacaactgaaattgaaaataaaaaataaaaacattaaaagaacacaatacggtattaactaatttttttaaaaaataaattctgaaattagaaaaagaaaaataagattttaattaggaatacaatttataaataactaaaatttgtgataaaaataaagactattgaaagaaaagaccatctaaaacacatgacgagataaattaagtaacatgcctataaaggagtagagtggtggcggttgatacgacatataaaaattgttaataaaacaccaaatagaatcctaatgacgattaaaaggagggacatcaggcaggccgtgaagcaaacaagtaaggcagttgctgggacttctagaaagtaaaaaaaaaataaaccccattgataatcatattcaatttttaaaatctcaatgacaataaaaaggagaagcagcgggcggggtgtataagagtgtagctgcagagccgccgacggttgacgggacttctagaaaataaaaaaatgaattccaatgatagttatgttcgatttttagaatcacaatgacaataaagagtaggcgaacaggctgtagagggcatagtggcatcgtttgataggacttctaaaaattataaaaaataaaactacaagtccaatttttaaaggttcggaacttccaaaaattaaaaaaacccaatgataatcatgttcgattttaaaatctcaatgacaataaaaaagggaggcagcgagcgagccgtagaggagtacaatgagaaagccgctgatgatttggcaggacttctagaaagtaaaaataaacccaaacaataattatgttcgattttaaaaatctcaatgacaataaagaaaagaaacagtggacgggccgtagaggagtataatggcaacgtttgacggggcatctagaaattataaaaacgaaacccaacgtgataataaactctaaaaactataaaatccaatttttaaaggttccaagaataatgaatagaaatagtggtatatcgagcaagcaaataaagaaggagatgacataaggggtagcaactggtgtgacttttaaaaactatataattagaaatacgaggatgataaggtttggttttttaaagtctcaagacaatgagatagttatttaaaaaaatttaagtaaaatcatataaaaaatatatgattttatttgggtgctagccgcgcaattgcgcgggccgcccaactagtttagttaatgagaatctagagaggttgcatttccccacttctgcctattaattggttcatttgttcattttctgaattatgaattatgtagcttttgattcttagaatctagaatctaggtgaaaatccaaattgttcgacagagttagagattaactagagctgtcaaaagctctttcaaatagaactaatacttttggggattatgtaggtctaagagcttagctgtggctccaattggtcttgcatgtgcgacaaacccaataagatagcctagatgctgtttcaacttctagcggaaacaaatgcttactccaaaaattttcacattagcaaaaaacattgtttaatcaatgcattgttagttaaactattatttttctccttgttccgtacgctctctcgtgatacaagtggcattgcatggcatttaattggttgaattgctcatgcttgtgttggagcgcgagtgcagctagtgcttaaatagttgcccggtgatatactctctcacctccaactcactgctaaaactgatgtggcaggcttatcgctagtatactacttatactactttctccgtttcagaatgtatgcattttaaaggtagatagagatgattaaaagaaagtatatagagatgattaaaagaaggctacgattgatggagaagagaatgtaggtgaagagaatggttgtaattggttgagaggaaaggataggtcaagaaatagctttattttgaaacacgattgtgctaaaaatagctatattttgggaaggagacagtacatcacttaagataacatgatgtgcatatatatagttttacttctaaaggtaaaaattagaggcaggacaaaagcttcttaattacaaggttttatagatgcagaagaaatgggcataggttaattcagaaacttgaattgtcagtacgagacacggtgataacctgccaaccttctcactgagactgctgccacgttattcggtgatgggcgattggtccatgaaaggtgcctgtcacaactcgcacggagtaagcagcacccggcttcttgcgcatcaagagcatcactctgtcctaatagtgttctttcgtagtggtaaacactgaaaaaaaaactcacagtcacacaatagtcccaacaactcaaccgtcttcggggcataaagcaagccaaatctaggaagtaattaatcagatgtgtgcaccaaagatgtagtaccgcaaacaccggaaactcgagcatctctgtgtaccagccttgtgcttctgcaaaacccgtcgcacgctcagcagcctgcttgatatgattctggaaatgatatggacgtgctgcttagtctgctgatagtatgtcttccagatggtgaagatctgcagcatacaagtaaaagaagccactcaacttcgagacgtcatatcacgtcactttggagttctacagtggagtacattttactaacctaagctgacttttttcatcaactttactttaccatgaccatgtcaggtaacttatcattacaaaatgaagccatgggaaatcacacagctatggccgacgagggaggaatattctcagaaacagtaagaagagctactttgctccatggtcttcttccacttgagtgggtcagttgactgtgtctcagtgtcatgaatccctctgctgtttagttccctgcttactgcaccaccttgtcttgtttactctttgttctcttgctgctcggccaacaatggagcagagactgcatttgcagggccattgaacaaagagctcgccctagggttggtgagtgacggtgatggctttggtggtagtgggcttggggacaaaggcttcaagaatgcaattcattgcttcctgacgctttgcgtcacataagatgatgtgtgaatgccaggaaagtatcagcctgaaatctgaacacagattaaaatcagcggcaggtcagatgcagaaagagaagcagggaaacagcataatgtgttggctgcctttccttaattgaggataaggcatctcttcccagtgaggtactccggtaaaaatgcaaataaactgttgattaaaatactttagtatcttcattagcatgacaaatagatgtagaactatagggtaatatgctaagaaacctagggagatgaaatttccaagacaaaactgaaagggaaagctacagaatgagaccggtgactaaagcagacagttttttttttatcagggtaacaaaacgggcatcatatgtagtataacagatatctcaaatacagaaagtaacatatgagcaaatatatagcatactgatgtaactcaatatgtactctgtgattttctttccttcgcaaagcagtagtttacatgttccagcaagagaagaaagtggcacttacagctacaggagcgccccaataacagagtgatttcacactatattcaagtcagcaaattgttagcttggactgagaattactgctgtacaaaatgctgggctgctggcacagtttttttaatacataatcatggatatgagaaggttataagcactaggctagtgcaaatttaaaaaggaatacatgaaaaatagcactcatattcaaaactaagattagcaatgagcccatgatatgaataaatactcaaattagctattgacaagaactcacaatggatcacaccttggcacgtgtaaaaggggcatagtggagtataagcttaaaatgtgtcccatcacaagcagcatgcctcaaatagcctttcttcaaatcaataatatcctggggacccgcacagattatagaacaaaataaagacgagcttgaaatttaataacaggacttcagtggaaactgggattgctcataacacttgtcagcatatgatcatctggtccacactcaaatggttgagcaaatggcctccaatcagtaacactaaataaatacaaataatttatttcctgtgctttagacttgccacagcggtggttcctgctgacaattatgtgaactccacttccactatttaattctcagaaaactcatccctgatcacttgcctgatctgacccaaaaaaactggtaatcttagcagttaaattaagaggaggaggaagcgtgccctaataatactcagtaacctaattgtcatctgggatcagctgactgaaattggttgtctcatcgagctaaaggaatgttgtgaaaggaacagcaggcacttttcgtcaggttcttgtttataaggggatgactaactttggatatcatcgaacaaagaatatggtttccaatgccgccaccctgtctccattcgtgcagtacaccaagtctgcactctgggtagctaactacacaagcatggactggagaaatttcctttcgcgtgctcaaagttagcagtgtcaaatagcaattaggttgagatgtcaacccaagtgcggtggcaaagttttcaacttgagctttgacaagagacaggaagaataaccagtcgtatcctatccatgtatttacaacatgcttaagatttaagaagaccataaacaagcattgcaggggcatcacgcctacacataaagtttttcaagtggttatatataatatctaaaggaatgactacacacggaccctccacctttaggaaagggagagagacaaaacaaggataggcagcattaagcacgcgcatcacatattctaatagaagaggaaaagcacaccaggaggaggctctgtgtacggtgaacttaatgacaggcaattgaaggagtagctttgtttactccaagttgactctcagtgaaatgtgtcaaccactagaataatataagaaaagaagcttggaggcaaggacagacagctcattctccctcaatttgaaagatgtcgagcgtgaagcttccccactaacgaccttagtaggttggtggaggatgacagcgatcagtgaaaatagcattttgcaatgagaaaaatagctgacctctagagacaaccgtgtgataatactgcattcatgcatgacaaactatgagatggatgtaagcagagttttggactcttcttgagcctccaaatctcttcctgtcgtgacatgctcacaggtacaagatcactctggttaagtcaaagacgttaagcacttggaataggaagatggtcaaaagaagagtcatgtctcttgaaaggtctcacggtggatatcatgctacacacttacaccgaggtcactatacaaattggtgcaggagctagtgacttcatcaccaactgtagttagcttagagcctagaggtgaatttgactacaggacaaaatagtaattcatacattattagaaatgtcagttcataaatatgaaaagatactccggatggacatgttgagacatatacagaatacaaaataaaatatgtggatgcagatttactgagtcactaatgataactgaagatataaaatatgacagaactagaaaaggacagaggaataaaaggttacctggacacagcagtatgctgtagctcttttgtagccagctcaaatgcatcctctggagtcaagaacatctcaatgtacctaaaaatggtttcagacatatcgatattcttcttaaaagagggcaatggtggtggcagattcactgcctccacctcaccaagtatagtaacttcttatttaccatctactccatcatgttttataccaactaccccatgtacttttatgttataaaataatccctttacatatatgattatatcatatttcacctgtacaatataacatctacaggtacaaaattgtcccaaaaacctcactattaatttgttttaatccgtagcaaagcatgggtatctggctagttataaactaaagttgatgcagatagtaaaagatactatatgcagattcatttggcaaagaatatgcattaatattagaggcaatcaagaagatttacagtgtcaaaagggccctaacattgatcaaatatatagtatttgacatttaagtgcaactgcatgattagtcctccacagttgagaatctaggcttaggttacaacgttcagttggaacttggaagtgtctgatgactgatggcatacaaaacaaatactcttaatcttcataggatccaaagagcaagtcagaattccgactccatacttgttcttttttccaccggcccagcaaaggagtttttttttcaatgctttcatactgctgcattgaaaattaagagttaaatagaggacaaataaagaaaggtgcactttagtaatactctctctatttcaggttataagatgttttgactttggtcaaagtcaaattgctttaattttgactaagttcatagacaaatatagcaatatttacattaccaaattagttttattaaattaataattaaatatatttttaaaataaatttatcttgggtaaaaaatattactatttttttctataaacttggtcaaatttgaagcattttgactttgaccaaagtcaaaacatcttataacctaaaacggagggagtagtatgaatcaaaacaaaattccatggcatcacaagaaaatcactacacctgagaaaaaagaaagaaaatagcatctagttaggttacctccaaaaacctatttaaccaaacaaggagacatcaagatagtgctgagtgccatattgttgctgattcctgatatgtacacctccagagggcagtacccgtgctaagagaatacacgccccactacaaaacaaaaatgtgtatattccacattgcctatccgagggcttaacactggcttcaatcatcagctgaactatcaattcaccaccagcataacagccatcttgcatccaccacacatttcatagtcactaacactggaccaccctaacataacaccatcggtgacagcaatcacacaaaaccatccaaacagcagcatatacagtccgcaattctacaccacaaaaagaatacgaggtacctacttagcatagggcccctatgtaggaagaaaagtagtggacagggatgaatgtggcggtacgcagcctacacatcctcacaacctaatagcataatacagcataaatggcagtagctattccatacctaacggtgcaaagccatcattttggttataccatgaataatacaagctgcggagaacattgcaattttgaattaaaaatccaaactgcaatcacatcacaagtttgcttaccttctaacgattgccaaaccaatcacgcatcattatgtgctcaagtgaattgcccaaccaatcacgcatcattatgtgcccaagtgaattgctagagaagagaccaaataaagtgctgatctcgtaggccctcatctcaatccttcttccatacagatgatgtggtaatgtatttctgtactgaatcgactcattacgttccccaaactaaataaatcagctctctaaattaggataggttcagagtaaggatcaataaatcagttctctaaattaggataggttcagagtaaggatcaaatcgtctacttcctcgaaccgaaccagtaccaaacgcaccaaaaggggatgaactggatctagtcatcatcaaagctaacatcgtgggtaacatcaacccccgtttcaaacgattcgtccgactggccccgaaaccagcgacttgagaaagagcctcacctcacctcacttgccgcagccgccgcccggggtacctcgcgcggctgcgcctttgggtggcgccgcgggaggaacctggactcggtgggagccactggtcgacggccggtcggctgctcgtccggcaccgtcggcgcggcgcaactgtgctgccctcgatgcctccgggggcgtggccacggtgggttcgtcggctgacgcagcgcgggccgtggcggtggtggtggtctctcgtagcccagctttctgtaagataagtggcccggttgagcgtgcggcggtgcgggtgggtgtgcacgcgctcggaggtgtgaaaacacgcccgagtaccaagcggcagcgtctgtactacttgggcccgataatttgaaggtatttgggccgaaagactgttacggcggtaacaccaattcgatgaggaataagttcaccttactcgagttttgatcgtaatcttaaactaatataacacgtccttcaacttatataaaactaaattatcaaaatcacacgatagtattgtgtccgattttgactgatgagacaacttggtaagcagtgagacccatgtgagacctcatatgttagtggctagcgctttgttcctcctctttcttccctttctgctaatgggagttgtagagggagcaaacgggggatgttgaggatgaagacgacatggacgtgcgccgagtaggagcgcttgatatcgccaccgttgatgcaaccggctactcggggatactagagctatggcacgacccatagaagacgacctatgccacctgtcttcttcgacacgatgggaggatggagctatggagctatgccagtatgccacccatgcctcgattgttgcctctctccctatatcccgttggcctgctacctgcaggctaggaagagggagaaggggaaagaggaggaagaaagctaggaggggagaaaaggtgaaaggaggagaaagctaacatgtggggttcatacaggttccacgctgactcagccgccacatcaacaaaaatatagaactatactggctgggatcttagctagctacaccggtattataagttgaaggacatgttatatatgttattgtggtttagggatgtgattcaaactcgtcgttaacatgttatatatattattttattttgtggaaagatttacaatacatatccgaaagacgtgatcaagtcttcaaaaaaagaaagacgagatcaaagctaagggaaagaagcgtggctgaacatgaatcgatcaatcgcgtagagaaaaaaaatcactgcttcgggccagcctcatccgcgcctttattttttttttcatgaaaccacagatgcagcctctgccatcgatgtccagagccagtccacgacacaacatcgggtcccgttcgtcggcgtacggatcggtcgagttggaggtggccagcctcaacacggctgcgcagcgtgtctcgcccacggttttgtttctcgatcgacaagtcggcaagacgggaatcgtcgcatcgtggacaagattgtgaggcgcttcggtcttcctgggccatgcttcgtttgggcattgtgcggcccacggtggtgttcccgggcgcaacatgctccctccacttcttgctttccgggccacaggccacagttgttctttctcgaaagggatgtgtgttgtgatcatcattcatactaagaagatctaatcgtcagtccgttgttgtgtactggggtttatcccctaatatctgttcttgcttaataaagttggttgtgtttaaaaaaaaaggttatgaagaaaaaggtagttcgacaaagcatatgatactctttgtcgtgtcaaagagaccaagataagtacaggagtaatcgtacagctgcccaacctaatcagcaccggtgaccgagaaaagctcgttctacctctcgacagatcgccgttagctagctaccgagcatagtcgcccatcgtaagtactagtacttcccattcacgcatacataaggacattcggaatcattttctttctcttgaacttcgatcgtgcgactgttgaaacctcctttgttgcatgctagctccatctgtcacgctctggctgccgcgtaggctggtgcatacatctggaggaatctttgcgctgcggtgattattagtggggtcgagaagatgggcgccgttctgatggcattggttggaaccgcccgtgaacactccagcagtccagctccatgtacctgatctgttctctagcttgcttttccttttcagagaatatcacgcgttcagcccgcttgttgcactgtaacgcggtcagtgccaccatcggagagggacatcgacatgttacctgtacggctgtgctcaatatataaacccgtgtgccgtggtatgtataaaagatctacggtaagtactggtttcatggcaattaatcgttgtttaggattttttttaccttttcgaaatgtaaataaaatagagggactggaattaggttttttttttggaagtttcgaactaaattaccacacaaaacctggaaattgggccttttgttaaatttaaacaaattctaaagctggaaagtagaatcgtcgttgatgacgtatgttctcattggtgatcgacgtaaggcaacagaaatcggtcattggtctccgtgtatggctgtatgcatatgcaagccccctgcaaaaaggcgcaaaagagtgtatagtacggtgaaggaacggcccagcgcaggcgcatgcagcacatgcatgttttccaacagcgctcgcgctggaaagtagtacgcgttcgtacagtatcctgtttgacattctagttgtcgggtggttgcttcggcctcttgctgtccctcggtccctaatccttcgcgtacgttgatccgcgatcgctcgtcgactagcggaagaacaggttttcaatcgatggagtacgcgcgcgcggtaccatctgctactgtagctagcactcgatcgatcgatcgattggcgcggcggttgctagctgcgcatatgcttagatgcaggctgccgatcgaaagcctgaaacaacgttacttgcgttgcaacttgcaaggacgtcatgcgcgtactcggttcttcaattgccgtgtactgcatcctagtgtcggccactttttagccgattttatctgcatggacggacttgaattgtgtgtttatgtgtccccgtgtttcgttgggacttaggacactaccgtgtttttttcttccttgtttgcgaagcttttggatgcagtatcaatctcttccggaacaccggcccgtgaatacgcactgagtttcggaagagagagagattaaagtgtcgcataattgggtttcagatagcagtacaagttactactgaaaagattggatttaacgtggatacctctctcggtcctccacggttgcgtgttaaatatgcacaggaacagcccctggcgtggcacgattacagcggagagattacaacaaatcttatcaagattaagagataaacacaggagactaacaaccatgatctatccctcaaagttaggaagctaatcctatcactaaccgtgactagatagaacaaatcttaacacccccacacaatcacaacacaggcaacaagttgagattgcgcctgaaagcatccatttgttgagcagtgaggactttggtgaaaccatcagcaagttgatcccttgtagagataaacctgatctctaatagcttttgtgcaactcgctctcgcacaaaatgaaagtctatctcaatatgtttggttcttgcatgaaacacacactacactggccaaggtcacctgtgacgggcccaaaccctcatctttgacggcttcgcgcatggtcagtgatcagtggtcactggtgagtccagtcacctttgacgggtggccggccgtcacaggtgacacccacctctgacgggcaagttactagaaggccgtcagaggtgttggtctccgctagccttgagcgagttaggacccgtcacaggtgactcatctctgacggccctttaaataaaggccgtcagaggttgaggtctccgtagttagaagctgtcacaggtgatctacctgtgacagccccaaaagtaaaggcccgtcacaggtaggtcacctctgacgggcctttatttgctagtccgtcacaggttatgttacctttgacggatttttgttccgacccgtcactgatgagttaattccagaaaaaaaataaatgctaaatattggctagcctcaggatttgctagccatgccctctgaaaaatagaaacatcacagatatattccagtcacagatccatcacagatacatcacccccccaatataacatcacagatccccaacaacacatatatgcagttcaaatgccaccattttgcacagcaaattcacaccccttgaaagccacaatttcggtcgttgctcatagaaccgcatatatacttaccaaatggattaaagccataatgtcatcgacctgcacaacctgtcaataaggaaaaaaaaaaggagaaaacagatgaatagtacaacataaatcgtagttgatcaaatgtgatgacaatttagtaaagtaccataaatattgcacatatgaaagtaaattacattgcactctataaaaacataattttttacatcgccagaaattataaaaacatcttttttacatcacaataaattatctagccaagttcatgagtctatttggcatgaaaacgtcctttcttgttcattatttctgcaagaataaaggcgcacaattcgcctctgatagcgggggggttgatgggtgagatcttgaagccagctctacatttctgtttaataaataagaggttaattagcacgttttgaatagcaatgtagatattgaaatgagcttattcgccattagcaacaacctcagggtcgaaatctttcacctctcttagaagtgttgacatgttgtggcacacgtggaaaccacattggtctccgatctgttgtgcgcatgcaaacttggtgtcatgataaagttcattcttgccctccttgtgcctaccacccttttccacatatgggccccaagccatatttaaggccttggtgatttcactgaaatcataatctttggacttattggagttaaggtaggtaaccctactccacttaggtacaatgactaggagaatccaatgtcgcctgcgcagtggttatgtagcgttagtactaagaaccttaacttcaaaaacaatatacacgaagggtattgtcctcttactcttggttgtgtgcgcacatgatgtactccttgtcttgatgggcccataaacaccggttgacatagtcaaccacctcagtgaagctctgtcgtaaattaacctcattcaccatggatggatcaaggaacccaacctgattaccatggcgacgactctcgatccaacacaaccttaaaatatttacgtattagaactaatttaattaggagatatagtccagtcatatcacaagtatagaaggtatgcacttacaaggagtagcattttagaagaccagtgtccaacttccggatcctgaaaaggtcgaagaggtcatcaaagcctatagttatataggcaggcgacgataggaacggctggtggtcgtgatgtccaactatggatgactccctcattttccgcttggcattgcttagctccatgtattgcttatgtagctctcggcaagcaatacccatcacagctaacacattgtcctccaccaatggcatgcctagctcaaattgggctggcgccctcacgaccttccccgatttgctcaccggcatcgacgtcgcagccttgcccctttttggctccggcgccaactccccgaccttccccttgccgcgttcacgcttctggcccttgacaagtggtggggagctatcggcctttcttgtggtctttattggagccaagctttgagctatatctgccaagtccatatcagctccaccaggagaatgaggtactgacaatgccggtccacggggagcctcaattgatagcttacacttgggaggtgtaagctccgtcggtcgacttggacgaggagtcatcttcacaactatgtcttctttgggccattgtatgaacgtcttgcgcgcatcgcccaaagtcatgatttcatcatttgggggcacgggcagcggatagcctgaccaggtgtcctttactgtatcgatggacaccttggcatacccagctagcaggtctgcgccgtggaccttgtctgtaaccgagggcttgaaagccatgccctcagcgacttcaggagcgaaagttgggtggactctcgctagtaggacacactgtgctgcgccctgcataaggtgaaagtttgaatttaatattggaatgtgtaaatgtcttttattagatatggatcggataacaacaattacctcgatgtggtccactgcagctagtggtgcgatcgggagaccaggggccggcacctctgtggatgcacaactactcctatgctgtgacggactcgcgtcgtgttgtacacgaggagttggttgcacagcaggtgttgtgactcggggtatattcatgtcggcgagcaccttgttaaccctttcttccacccttgcattcatgctagcttctagttcttgaatgacctcaaccttaagttcagccttcaaacgagcgtccctctcttccttggagactttccgtttcctgtattgggagctgtactgagggagtccatgcttccagggcacatcgctaccaattccccgagttcggccaggatgttctttggttccgagcgcctttgtgaggatgtcatcttcgcgcctcttcggcgcggactcaacctcgctttgtgaagcttgttcagcaaccaagcccaactagaaaagaagatagtcgtttatacgaacttgtactttatacgaacggaaattagttaggttaagtagtgaactcaccagttcctgatagacgacggcatcacttttgttctcaaatgtgacagagccgtccgggttgaccttaccccttgcccgcgcccagttgcgagctctttgttcagggatgtctgaaaacggggcagggacattcgctgctgcagcggctgcatcttcttgggcccatattgcctccttgccgatgtaccctgcggtgcccagccgatgcgggtgctcattccgctgttgcagtacgcgatgtgcctcgctggattccctaaactcttgggtggtcttgagagagcagaattcctcccacaccgcttcggttatttgatggtattcatcgaacggcgtatgattgccgggcgggttgacatactcggtgaagagcttcgacttccaattcttccaagctttgcccatcttttggaatgccttccgcttgagcctatcctttgcttcggctggaaatgtgaaccatttctccattgccgtccaagctcgctctttctcggcttctgtgaccttcccgatatctttatagaggatcccgaagttctcacgtgccactagcccgcagcagttagaccatcttccaatgacagtcctgggcgccgtgggcctaccactagcgtcaacctctcttataacttgcactgtggtcggccatatattttgtgaccgcggatttctactagacctacttgcacttgtctcgcccgacatcgacgtatgttgttcctgcggcaattctgcagcacaaacagaaggcaatatttgctaaggggtgctagctaaaatttatgtggtcatgtggtgaaaatttatgctataaattaccatgaatttcgggttgttggaccgccgttgtcccgggatgaccttcggcaattgcctctgtggctgggtttgcttcttcctggatcctcgcaggtgttggggagggcgggtttgcgccgggcgttgacatggtttaactttcgcgaaaaagattataaatttcctaccattagactaaatagcattagatccaatgtaatacggggtatactatgaaagatatggcctcagttttgctgagaaatatgcatcaattacaatcatttgcatgaagggataaaaagaggaaatcagctactaggagaaaaaagcaacccaaagaaaatagaacaagtgtagttcatctgttcttatcaataaaatagaacaagtgtagttcatctgttcttatccataaggaaaagagcaagtgcaggaaattaaagtagtagcaacagcatggccatataatagcagcaataagagcagtagcagggccatataacagcagtaggggtatatatgccacaggggcagcaacagcagggggagattcacataaacagcaacagcagggtggaaattgacataaacagtaacagcagggtggaaattcacataaacagcaacagcagagggaaattcacatagacagcaagggtatataaatcaacaagtgtagataatctgttcttatccataaagaaaagaacaggtatagatagaatgttattaagcaattcatccttggccatttaacaagaagtacaggggcaacaacagcagtggtatataaatcatgcatatattattgtagataaaaaaatgaacaagtgcagaaaatctgttcttatgcataaaaaaagagcaagtgcacaaaatctgttcttatgcataaaaaaagaacaagtgtagaggtatataaccactgaatcaatcatgcaaatttaaaaaacagcagcagcaagggtacagaatttgcatgattgacataaaacagcagcaggaggagtatatatgccacaggggtagcaacagcaggggcaaattaactaaaacaacatgtctagatatactcctcttatcaatccagaagaaaagagcaagtgcagaaaatctgttcttatgcataaaaaaagagcaagtgcacaaaatctgttcttatgcataaaaaaagaacaagtgtagaggtatataaccactctacactggccatttaataaggaacaagtgaacaagtgtaggggcagtagcaggggtgtagataaaaaaggagacagtactactaacttcatgtaaacagcaattcatccattcaattcaagcaagtctagataataaaacagcccacaatcattgtggcagcagcagcaagggtatataaatcatgtatataaacaacaattcatacaattgacctattcatagacaaaaagggtatataaatcaacaagtttagataatctgcaaagcctccttaatcatcaaattatgacagaaaacaaaatgcatggagaattttggtgtctaggtcggttccgtccatggactacactggcctatccaccaaaattccccatgcattttgtattctgtgatggtttgataacctcggaactacattaaatctgcggccaatctatcaattcttcccttgtaactagatttcaaaccctacacctaataaaggtccttaattatcaaagacactccatgaatggttatatgtccaaatggctcttaaatccacatccaagttgcaaactagctacacattcaagttttaactaacagttgcaaccataggcagcagcatgggcaaacatagacagcaaggggcaagtgtagataataaaacagcctacaataatttatgtggcagcagcagcaggggtatataaatcatgtatataaacaacaattcaactattcatagacaacaagggtatataaatcaataagtgtagataatctgttcttatccataaagaaaagaacatccactgcagcaaaattcatgctaagatcctctattgatgctaagattcactgcaccaaaatcatgtatataaaatctagcccctacattcatccaaaacatccatagacaacaaatcacatttaattcatctatacagcagcaccaataatcgaaacaacaaatcacatttcattcatctaaacaatgcaattcatccatcggaaaaaaggaggaatgggggagggtggcggcatacttggagaagcggcgtacttggagacggcggcgcagaccgtagtcgtcctggatcctggtggcggcggcggaaaggcagtggcgaagaggtcgaggcggtcggcggtggtcggggatcccggcgtcggggaggtcagggtcggggaggtcggggaagtcgatggacggacggcggagaggacgaccggcggcgagggcggcggtggagacggcggcggagatggcggtggagaggacggcggagatggcggcagagagggcagcggagatggcggcggagagggcggaggagaggttgaggcggcgacggtggagatggcggtggagaggacggcggcggtcgagagagtgagtgaggaggcggcggtggagaaggaggcggcgagggcggcggagagggcggagatggcggcagagagggcggcggcgaggagggtctggatcgagagagagagaggcggtggcgaggaggtggagatggcggtggagatggatggcggcggtcgagagagtgagtgcggcggcggtggtgcaggccggcgtcgggaaggtcggcggagagggtgagcggcagagaggtcggcagtggagaggtcgaggcggtggtggggaggtcgaggcagcggtggagaggagggcgtagagggtggcggagaggtcgagagggcggcggatttggcggcggcgaggacggcggtggagaggcgaggcggcggtcgagagagtgagtgagtgagagtgggcgccggatctggatcgatctagaagatgtccaaccctaggtcaaccctagtcaaactcacctgtgacgggctccaactatgtggccgtcacaggtggcctcacctgtgacgggcgccaaccgtggagccgtcacaggtaagaccacctgtgacgggcccaacactctgggccgtcacaggtgaggtcacctgtgacggccctacagatagagcccgtcacaggtgagtttgcctagagcaattttattttattttatttcactagttcttttattttccttaacatattttcacatacactacatattttttttatacttaattattttatttcactaacagtagtaattgcacttcattattatactactttaattattttatttccaatgcttatacttgcttaattattttatttcacttctagtgggtgcttcacttaattattttatttgactatttcataagcaatatactattgatcattgcgaacatattagagtcatacagataacagacatgtagacataaactacgtacataaattacaaaaataatccttcctcatggtcgacacgtgcatattgaacttcatcttcttcctcctcctcttctagaggtatttcttgacctatgccgtggacgtgctggttgtaatcatcctcgtctgcaatattgtccaatccaacaattctccttttcccttcacgaacaacatgtagtttcttgttacacgggtcaactatgtagaacacttgaacaacttgtttggcgagaacgaacggttcatccttgtacgcgttgttagccaagttgacagtggtgaaaccttcattgtcaacttttacattgcgaagatcgacccatcgacaacgaaacaacgggactttgaacttcaagtaatctagctccaatatttgctcaactctaccatagtattgatcacgacgaccaccgtcactagtagcctcgatgcgtaacccactgttctgcactgtgcatttgctgtcttgctttaccgtgtgaaaggtgtatccatttatgtcatatccttgccaggtggtggcactccattcaggaccctgtgacaaccactgaagtgtttcactaggcaagttctgcaacctggcaattcggttcttcagccactcgttgaaagaagacatgtgcttattcctgacccaactctctgatcggcctgggttctcttgtcggataactgcaaggtgttcgtcaacgtacggcaccacctcagtcatatgctgtagtaccgtgaaatgagctttatcgtacaccttccgatccaacctaatagtctttcttccaacagtaccaacaccgtcaagcctcccttcgtgatgagatcgtggtaatccaattgaagatgtttctgacatgtagtccacacaaaattcgatggcctcttcggtggtgtaactctcgatgatactcccctcggggtgtgaacggttccgtacataacccttaaggatccccaggtacctttcgcaaggatacatctgcgtcatgaatgctggaccacagcactttgtttgcctcacaaggtgcaccggaagatgttccattatgtcaaagaaagttggaggaaagtacatctcaagatgacatagggttctcacaagttctgcctgtagttcatctagtccctcgggatcaatgatcttctggccgattgcatggaagaaggaacacaaccgctggatcgtgtgtcacaccttaggaggcaaaatattccttattgcaacgggcaacagctgtgtgataagaacgtggcaatcatgcgacttcattccaaccaacttaagatcttgcagtgaaacgagcctactgattcttgatgagtaaccagatggaacctttataccactcaaacatgttagcaaatcaatcttctcttctttcgagagagtgtagcaggctggaggaaggtaaaccctgccggattccgtggttatgggatgtagctccgaccgaacacccatatcttccagatctcgtcgggcgttgagaccatcctttgtagtacctgggttaagcagtaatcccattaaactctcgcatacattcttctcgacatgcatcaaatctatgcagtggcgaacttcaagatcctttcagtatggtagtctccagaatattgacttctttttccacatgctcctctcttttgtcttttgtttttccacatgctcctctgttttttccttcgatgtgctcttctcttttcgctttccaactttcctcttttttccaaactcgttggttattcccatcactaagttgtgcacctctgtccctgttagctctgtcgggggtccggctgtatctctgtgtccattgaaattcgttctcatattcctatacgggtgataccttgggagaaatctcctgtgacccatgtagaccgtcttgtgtgaatgcttcaaccatttgcttcttgtttcctccatacactccgaacacgcccatttccctttcacagtttggccagaaaggttgccaagggccggataatcgttgatggtacaaaacagcatcgcatggaggttgaaatactcttgtgcatatgcgtcccatgttcgtgtgccctcattccatagcctttcgaagtcatcgattatcggttcaaggaacacatcgatatcgttgccaggttgtctcggtccttgaatgagcatggcaagcataatgtactttcttttgaaacacaaccagggaggaaggttatagttaacaagcagaactggccatgtactgtgacgactgctcaaatcaccaaaaggattaatgccgtccgtacacattgcgaaacgcatgtttcttgggtcatttgagaattcctggtaaatcctatcgattgtcctccactgcactgaatctgctgggtgcctcagcatagtatcgactttccgttcttcggcatgccagcgcacaagcttagcttgttccttgttcgcaaacattctcttcatgcgctccgcaattgggagataccacaccacctttgctgggcctcccctctttgacttacttccttcaccttcactctttgctcgtttgtatcttgatcccccacaaatagggcagacatccaagtcagcgtattccttgtaatacaaaatgcagtcgttcggacatgcatgaattcttctgacctccaggcccaacggacataatacttgcttcgcttcatatgtcgtctgaggtaaattgttcccctctggcaacagatcctttaacagctcaaggagttctgtaaaactcttgtccgaccagccattactagccttaagcttcatcagttccaacacgcatgacaacttgctgtgcttcgacttgcatccatcatacaacggcatctggcaatcttccaccaacttactaaacttctcataatctctgtcgttgtcctctgcgtcttcaatgtcatgcaacattgtagatagacattgagtgtccaaatctatggtctctccacctaaaggagaaggtacgaacatgccttctcgagctgcggcggtgttctctacatcctgatccaacacttcttcagctgcgtcatcaggcgcctcttgctctccatgcttggtccagcaggtatatttcttcatgaatccattcattatcaaatgagcatgcacttcatccttgtcttcgatcatctgttcattcttacagtccctacatgggcacaacatgtgcatgctcatcctactttttctgtcattatccgcaaatgtgacaaattcagtgaccccctctctatactcggtagacgaacgatgcgcatagtacatccatctacgatccatctgaaatcaacaacatacgaagaaaaataaatgatgatcgatatgttgagaatgaatggagaataatgtgttttttaccttgaattttagcaaaaaatcgccccccttgccctcccaaccgatttgtgaacagtacaatggtcgggatggaaagcagttggcagtttgggggtatttatagacccaacacacctcaaacgggttagataaaaaaagcccgtcaaaggtattgctcatacctttgacgggcttctattcaacggcccgtcactggtatccgctcacctgtgacgggccagaaatgaaagctgtcacaggtggcggcccatcacctctgacggcttctaatgtatcggcccgtcacaggtgaggggataccagtgacgggttggaagaaaaactcgtcactggtatacctctgacgggttttcctttcggcccgtcacaggtgaggggatacctgtgacgggccacggccagatgcctcaccggtgacggcatcccgtataacccgtcaaaggtaatggtcactactgaccaattcgtttgcccgtcacaggtatcccgtcagaggtgtgaggatctggcgtagtgacaggatttgatgacaaatacttagctcccaaattatcacaccaaagacaagcagtagttgggtgactaatttttaactcatcaagcactttttgtacccacattacctttgctgtagcattagccaaagacttatactctgcttctgtactagaccgagagaccgtggcttgcttgcgtgcactccatgaaataagattctttccaagaaacacagcaaaacctcctgttgatcttctgtcatctagacatcctgcccaatctgtatcggagaaagcactgacaagcatagatgaattcttacttatcttaagaccaacatttcttgtaccatgtacataccgaagaattcttttaactgctgaccaatgagtagtagtagtaggagcatgtaaaaactgacaaaccttgttaacagagaaagaaatatctggacgagtcaaggtgagatactgtagtgctccaactacattccgataccgagtggagtccaatggccctagctgttctccactagtaatagacagcttttctaacactgataaaggagatgtgactgacttacagttggtcatccctacacgctgaagtaaattagttgcatatctttcttgtctcattgtgagaccatcatctgttctctgtacttcaatgccaagaaagtagtgcaagtctccaagatcttttaaggcaaaatctgcttcaagaccctttaataaagcatctgtagcactttgtgaagaactggcaactataatatcatccacatatactaaaacaaacatggttaaatgtcctttgttaaggaaaaagagagaagcgtcagctttagagggaataaaaccaagctactgcaatttctgactcaagcgtgaataccatgctgtcggtgacatgggaccgggggtatcttgactagaggtttggggtagctgcagtcacccacgtggcctaaccccctcgggggggtcgggcccgagggtgatgtggccgcccctccttctgtctccccgaggggtcgggccgctcccgtttcggccccgagggctggggcgccccgaccccctgtgggtttggcgccacgtgtgtgggttaggtgagcacagcggcgctcacctaaccgcgtttattgcgggttggacgagcgccccacgccgcatttaatgcagcgcagcacactcgttcggtccgtgacaggtcacagtgtgtgaccggtcacagaccggtcagatcgcgggttaggtggcaacaggcggcctttcgcacgcctcgccccgtcccgtcggaatgatgagagcctctaggcactcgtccctagccggagccggcgtgctgactcctggagttagcacgtcagtcccggctagattcataccaggcttcatcgcaaccattacaaggaagtcattttatgaagaagggctgacgtgtggcatgctaaactgacgcgtggtagacaagaatgaccggtttgtgactggtctgacgccggtcacgtcatcggcagacaaccgtggtcccatgttgcgcctgcttccggcggagtggaggtaggtatggcccatcccatcagagggtcattcggacaacagccatggcaaatctctgcccattaatgagggagtaacagggagatccccggtgtcaggcgagtgatgacgctgggcctcactcaaagacaagctgtgatttagcttccaggcgaaggcgcaagccagttttttcttttttgggaagatagggtgagtccccacccaaaagaagagtaggtagaagtggtgcatgtgggatccccttgagatataaaaggaggaccttgcccacttaagaaggggggagctggggaaagaggggggagaagacctgagctcgtagaggagagaaagaggaagagggtttctagagtttgaactctcttgctctccagctctttgtaactccttcatacacagatccaccagaacacaggagtagggtattacgcttctcagcggcccgaacctatctacatcgcccatgtcttgcgcatttgctctctcgcgaaacattccacagatcgagtgcttagaacctcacctagcgcccccggccgaaccggcaaaggggggcccgcgcggtctcccggtgaggagccccacgctccgtcacatgctctaggcacttgtttgagaccatataaagctttatcaagtttgcaaagataatgtggatgatatttatcttcatacccaggaggttgccgcatgtatacctcttcctccagaactccataaaggaatgcgttctgtacgtccagctggcgtaagctccatcctcttgtaactgcaactgacaacacaagacgaatagtggcagctttgactacaggactgaaggtgtcctcatagtcaatttcatatctctgtttaaaacctttagcaacaagacgagccttgtatctatctatagttccatcagccttctgtttaattttatagacccacttacaatctattatattcttcccttttgtaggagggactaaatgccatgttttgtttttctgcaatgctagaaattcattgtccatggctagcttccaatttttactattcaaagcatcattcaaagtatcaggttctgactcagcagtaattaaatttgcccaacgaactgtaccgtctgtgtaaaccttgggtttacgaattccctgttgtagacgagtggctggtcgttgaggctgagtcagggcagcttcgctggatgtggtagagttgttcgccgtagagttggtcgccatggacgatcttgacgacgagctgtccgagagaggctccgacgagcccccgtcgatcggaacagccaaggagtcatcgccgcgtggaggagacgccggctcgggcgcactgtcggagacacgcgacgaggaatggctggtggatggcgatcggctgagagaagagccggctgcagcgcctatatccccaggatgatgcgccgcagttgcgtcagaagtcgcagcgtcgtcaggggctgcgtgagtgttaggagccgcggagtgcccgggccgcccgccgagcagaaaaccatgggtgttttgctccaaaatttgccctgttcgcccagaaatttcagcagcagcatctgcactcgtagcaacatcaactggagactcatgagcagggttagtagaagaattaatcacatattggtcaacatgttcgtcccgagaaggattcaaaagatgttctgggaggagaagaatttcagcccggagacaatgaccagcatttggatgaaggtcagaaaatgggtagatatgttcatcaaaaaccacatcacgagaaatataaacccgaccacttaaaccctttgtgcattacactgtaaccaaggaaaacacaccgtttcaagcggaattggagtttgtgagaattgtaagggcgtaaatttggccagcacgcgcagccaaaggtgcggagggaggtgtaatcaggtttgatatgaaagagcatttctagaggtgtggagccttggagaacaggagtgggaagccgattaataaggtaagtacctgtaaggaatgcctcatcccaaaacttgagaggcatctgagcataggctagaagggatagcccaacttcaacaatatgatggtgcttacgttcggcagacccgttttgttgatgtgcatatggacatgacacacggtgagaaataccgatgcgttgaaaaaaggaattgagtttgtgatattcaccacccaatcagtttgcatagctaatatcttgcgatcaaagagtcgttctacaggattctgaaaattatggaaacattgaaacacatcggatttatgtttaaggagatatatccaagaaaatttgctgaaatcatccacaaaactcacataataattattcttcccaaccgaggttggtgcaggaccccaaacatctgaatgaataagctctaaaggagcactagaacgactcaaagacttagaataaggaagttgatgactcttccctttctgacaagcatcacaaaccgaatgcttgtttgactcactaacacaaggtaaattattatgactcaagacttgttgaacaatgactgaggacgggtggcctaggcgacaatgccactgcgaaggagaaagcttgatagctgcaaaaacttgtttatttgggaatgatttcagaggataaaggcctcgctcacatctgccttggtgaagtagtttcctcgttacctgatccttgatagaaaaataacgagggaaaagctctaagaaagcttggttatcaaatgcaaggcgatgagcagagattaaacttttgtttgcttcgggaacataaagaatattttttagtataagatcacggtgttgggtgcgaacaatagattgaccaatttgattaatcttcatacctgaaccactggcagtatgaacttgatcacctccattgtacttctcccgcaccgtcagcttgtcaagatcgctggtgatgtggtccgtcgccccggtgtcaatataccaattggtaccaacaccgtaggaggaggtagcagcagcagcactcttctcttcgccagtgaaggaagcatcaaacctcttgtagcacttgaccaccgtatggcccaatttgtcacacagctgacacttggggtgatctcctccttggttgttggtgaagccaccacggccgcggccttggccgccgcgaccacggttcagattttggccctggtttggctgaccatggccgcgacctcctccattgccgccgcgagaagcagagttggtggacgactgaatgccaccctgtcgaagttccaatcgctgctcaaaagtaacaagctgtgaaaacaactcaccgactgagattggctcagaacgttgggcgactgcagagacaaccgggtcaaaatcatcatcgagcccagccaggatgtcggagacgatgtcgtcgtcgtcgagcttctttcctgccgaggccatgtcatcagcaagaccccgcatcttggccacgtactcggcaaccttcagattgcccttcttcgtggccgtcagagccatgcgtgtgttcatcacacgcgcacgggagtgagatgcaaacatcccacttatggcatcccaaaccccaacagcagtgggaattgagaccacctggatgaggacatcacgtgagagggagagcaacaggtagctgagaacctgctgctcttgcgccacccactcggtatgcgcgggattggtgacccgcacatccttgtcgtccttcttggtgatgatggtggccggcggctcctcctttgtgccgtcgatgtatccagccatctgagctcccctgagcgcagcaagaacttgcgcctttcagagaggatagttgctgcgggagagtttctctgtgaccgcgtgcgcgagagaaggagcagcgccaccggctagcgaggatgaagacgacgctataatcacgacgtcgaggaagcaggctctgataccatgaaaagattggatttaacgtggatacctctctcggtcctccacggttgcgtgttaaatatgcacaggaacagcccctggcgtggcacgattacagcggagagattacaacaaatcttatcaagattaagagataaacacaggagactaacaaccatgatctatccctcaaagttaggaagctaatcctatcactaactgtgactagatagaacaaaccttaacaactactatacttatacgcataaatatctataggtatgaattgagtgctatctttatcttaaactagtactttatcataaaatatactccctcgttccctaaatgtttgacgtcgttgactttttaaaacatgtttgaccgttcgtcttattcaaaaactttttgtggaatgtgaaaaactatatgcatacataaaaatatatttaacaataaatcaaatgataggaaaagaattaataattacttaatttttttaataaaacgaaggtcaaacatttttttaaaaaaatcaacggcgtcaaacattttgggatgaatggagtagtaacttttaaatataaatataaatatgcccttatctagatttatagttaaaagttattatattaatttgaagataaatggagtaattattttcgcacaacgtgtacatcgcttgatctgtgttcagtgccgtcgatggccatgtgccaagtgatcgaccgcacaggggcccccaaaatcaagggccccaaaattctcatatttaaatacaagacactaatttccaatatgtttttatcctattcattttatttttttttaaaagttcccctcatcttgacgtactgatttggctagaacatatttattttctttgcattcaatagatgttcaataataattatggcaaactcaaagaaatatagtttatagcggcgccatgaacgtgcattctagatactaaacattcaatttttacgattagtaaagaaaatcgaataactacattaagaagcacttatttttcttacttaaggaggtgtaagccaccatttacgtaatattttttctgaacaatttagtatcccttttgttgatattttctaaatataaggtctcattttaagtttcacactggggcctaaaattgctaggtacggccctgtctgtgttaatgtttttgggggcatatgggaccacgtcaagagtgcccaatgtgtcgaggaaaaaaatgtccaatctacgatactactcaaaactaacacattcctcttgaaaacacacgctaaaaaagtttgagatcagcgacaaatttctacctcactaaattcatattcaagtcatacataaatgactccatataccgtaccaaaaacatcttctggaaaaaaaaatatctgcactactacataacatcataaaaggactagggctgtgtttagttcgtgtgccatttttttaaaatatacggacacacatttaaagtattaaacgtagactaataacaaaacaaattacagattccgcctgtaaactgcgagacaaatttattaagcctaattaatccgtcattagcaaatatttactgtagcaccacattgtcaaatcatggtataattaggctcaaaagattcgtctcgcgatttacatgcaatctgtgcaattggtttattttttcacatttaatgcttcatgcatgtgtccaaacatttgatgtgatcgaaaaagttgaaagtttgaagaaaaaaattgaatctaaagacgacctagcactatatataccgaaaatgttaaaactgttaaaactgacatatataaacctttttcctatctacatgggttaaaaataatatacaactagttcctttgaacaactatagatgccggttctaagaaaaaccgacaccaattttataggtgccgccttcaatatattatagatgttagttaattaaaaaaaggcattgtaagaatcgagccaaaaatgggagatatttttttagcaaagtcaacatagatcatccttatcccttcgctcgttccacccctttctctctcgcccacgccatcccttcactctcgccctgccataccctttatctctttgctctcgccctgccgctttctcctcccatcctcctcagcatgtggcagcatcccccttccccttccccaggttgttgttttctcctcaatccaaggcaatgatgggggctcgagcaaagatgacggcggcaatggtttggttggtgtgataacgactcccactccccctcgccctctttgtttctcgggcgtcgatgcatcgatggcgtcacctccaactcaggggtcgttggatgtgccccccccctccaacagcgatggtgatggcggtccgactacggcgagcagtggccctccctttgaccctgcctccctgtgagcaatgactagcaggtaggtatccctcctctccttccccatccatccctcccaaaaaaaaaatcccctcactatgtattctggatttgacagtggtggtgagcggtaatgccttggcctccaataaacagcggcggtggcggcagtggtttttgtgagaatttgttatttggtttcttcttattggatctgtgagaatttttattcagcttttgtccctgttgttcttggcctgaagcattgagtacccgaagcatcaactcgatttgagccgatgcgagcctcttttttttttattcctataaccatcaaaggtactgattcttaaacccgtacctttaattgttcacatcggtattgtctagaggatgcgggtaggaaatccggtgcttatggactgttcccaaccggtaccaataagatttttttaaagcagtgctgggaaccatattggtccaggtttgtctgcatcagttatgcatgggggcgaacaaaggcgttgatatttcgtaacatcttaacagatgactgttttcattttggcgaaaaaaatggttcgtccaacccggccgaaagcgcaaaacactatcttgatctttgacagcatattttgctgcagaaaccccagaaatcacgtacggcagcccagtgcaagagttaagatattgtcaggagactcaggatgctcagcacgaacacaggagactgccggtagtgcggccaactatatcagcgcgctgccgctgcctgtctatatcagctcatcagactccatcactccacagcaggagccagccagccaagccggggtacctggagctgcatgggcccatggcatgcatgcagctttcgcaccgagagcgcggcacagcgatatcacgagccggcccggcgcgctttccccctgtacagtacaccgaggccctgcactgcgcgcgcgcctggcctgctataccgatcgacggcccgacgggccccggcgacgccgcgccccccgctgcggcccttccctgtatgcatggcatctgcgcgcggatcgcgctatacctccatcgatcacccaaccaacccggcatgcatatggcagcgtaagcgttcgtgaaaaggcggtggcgcgcgcggtcctcgtggcacgacgcgaagacagcaagcggcgcgtgcgtacgagcgtgcgcggcgttttgtgctggcgtgaggtgtgtcggagcggtatgcatggccgggccccgatgatcgatcggtcggtcgatcgacctgcggtgcggggtgcgggagccggccgggcttgtactgtagtagcgtagtgccgtggctgtgcatgcgctgcaccgctgcagggtgagacagacagaccgggttcgatcgaggtggtcacatacatatatatgtagccagggtggccacaggctacactacgcgtgcatgtgacgggccagcatatatagcactgtgatattgcgagtatatatatgattaaaacacgtacgtctgttattgacttattgtacagtagtttttttagatacagtagtgtgcagtagctaaggtaggtactatacgtacgaatacgatgttgctcccctttaccttcggttccttggagtagtatacataggaaatgagatattttttccccaaacaaacaagaaagaagaattgaaggtcttcaagtaaagggcagataggaattgaagaaaagtctactccaaataaccaatccttggagtagtactccgtactgatgaatgaacggtaagaagtttgatcatctctgaagaaacgcaaattccaccagatgtgtgcaagctgattgcgctgactgctgaccgatggtacgcttggctgcctctgccacatccgaagtttcatcgacttctgaggttgagtgtgacttcacggtccaagatagtactccgatcgagtagattgcctatgtcacatcttatgatatcgactgctagccagtacttgttgataaacaaaatttgaacacgtctgcctttttttcccagcttccggagtttcagagaatactctcagttatccgataacacacagttgctgctacagtattgtttaccgcaagagcgctgagcgttacatgtatacactgataatactattacaaaggagtacacagtcacacgaacagaatacaaagtgtgctgttgctttacagggattgtcaaggagaccacgattgcttgtgagagttgacacgagctggacgggatctctctgagagcagagtgacattcattcgggcgtgaccacgaggagcctttcgtctggtaggcctttgcgtgcatggcttcctctccaagctctcacaggaaaaaggggacgagtactcagtgctgcaggttcttattccctcccagattcttcgtcacgtataccaatcttcagaaagaacacgtacccggggaataactctggccggcatgcgtgtagagacgagcacggcatcgtcgtcatctcactaaccgagagacagtgaggttcgcgtccatgcaaaatatacttcattcgtgtgaaaaatatagtaatctaaaatggaacacattctaggataataaagttagatatatctttgttcaagtttaccattttacattctatcttaagttcttatatattggaatagagggagtaagtatttttttaagttttaacaaaaaataaaatcaagaaaagaaattaattgttatgaatgttactatgaaaattagataaagaaaaccggttgtgatcggttaaaaataaaaaagaaattttaaaaataccatcagcaaggtagatgaagatataaattgttatatttttagtcgaacggagtactcatctttttttccttttttttaagtcgccgtctcccccgtcacctcgtgaagatagcaggcacgcttactagcacgtgggccgagcgaaatgtattggagacgtctttgttttcctagccataaactctctccatccctaaatacttgacactgttaaccttttaacacatgtttgatcgtttgtcttattcaaaaattttaagtgattattaattctttttctatcatttgattcattgttaaatatacttttatgtatatatagttttacatatttcacaaaagtttttaaataatacgaacggtcaaacatgtttataaaaatcaatggcgttaaatatttagggacggagggagtataatgcatatatatgttcgagaaaaaacatacagttccaatacgtacatatatgcctctttctcacgtgggttccggatgttcatctctctatctagccgtagttttcacccaactcttcacttgttgcttgaaacatagtcctaactaatccaatgcactcaatctggttggaaatgcttccttgaacatattgtcatttcaataattacctcgaaaatcactggataggatttctcattaaaaaaaccattttcgtacatatctcctatttatttttacatgcggtccaaaaaatttacagtgtgtgaaaatgcataggagtctccttatcaagacccgcgtgtaaaaattttgacaggacaccccaaagtgatacggctagtggacaaaaaaaaaagagtaattagctataagatactacggcaattattttattatcttcactccaaatgaagagagaaacatataaagaaatacattttagccgtcatggacgtcgtcgcctcctcctccaaattctatagggttttggagggggatcaggagagggagagtggattagttcaatcaggttacaagcaatctggccctagaggaaaaatagtctttttcacacggtttctctctccatttggaccaaaattaataaaataatgatcacaatatctcatagttgattaccatttttaggattccgatagctatgtcatgtttttggagtgtccttcagcaatgagcataaaaacaacttttctaattaattttcacaaacaatatatagttttaggaggaccgcatataaaaaggatatatttacaggagtcaccctaggagcaccacatgtataaaagcaaataatctattaaaatcgaaggagggtgggccacttctagccgcaagccccttcgcatctctctccgctcctcactctcctctcccgcaccaaactcgatctcctctcctcctaggcgccaccctcgtcatctcttcctttacacacatcccacgttgatgtcgccgcataggcttaacaaggagttcaaagccataagatctgattcaccttggcctttccactggtggcgcgcccaaatcaattttcgtagacggcggtggatcgagccatatgtgaaaatcaactatttttataggtttttaagttataggcgaaccctccaacagcatgtatatatgaaaaaaaaaatctattctagccgtatgtacaaactggttttgtagtagtgattcatgttgaaatgcttattactgagaaaagttagcacatgttgatgggtcaagcagttatatgacttaaaggatgatttcgacgcaatgcagaacacttgaagaatgggcctcggtgaagggcaagagagacaaattttttactatgctcatgcatgtacgaactagtagaacagaacagcatactcagaacatggataatctgcgcaggaaaccataattaatgccatctacagtacgcaggtgcgcgattaagttaaacgcgattgtatgtccgcatcaacgaaaacaaccgcaatgaggccaaagcagggagaatctcagcgtataggctggggccccagccccccaactcagcagatgaggcatgcagccatattcctctgcctggctctcactctcactcgatcacctcccggtaaaatccaaacggcgcggcataattctgccgcataaaaccaagcgaccaaattcccctcctctcaccgtgtcacacgggaacagaacttactactcggcctctgcagctatatagctctcgatcgattctgttctaagctctagtaatctagcctattgcatgccgttcccaaggttagcgaatgtttttagactaagccgtgatctatcatctgatagtatcaggctatcagccatgaattaatatatatatataaatactactatatggatgcatatatatgtctgatgtgacctatagctttgacgcaatttcctcacctaatgcttgtgatatctatgggttgttgtcacgacactcgttataggttagtgatatctaaaactaattttgattacgtttctggagtttactttttgtttatagttaggacatcgaagggtcctgtttaaaaaggtcctccttgacgtacggattagagtatgggtcattgtttgagtatatgcaataatacgtacacaccatttttcccggttgatatatagacgggcagcattacaatactaataatcacactgtaactgccggcctaacaacgtcattggtcgcgtgcgatttgacgcctgcttggcaaatcgatcgatcaggctagcatgccgctagctggggacatgcgtgaaaagattgtaaaatcaccaaaaccagagaaagcacgtttaattattaatgtctgatcttgattcttgtctggatcgatcttcagaaaacatatatatgtgtatatatatatacaactgtcagttagaacatatgatccgtgaatttctcacatggttggcctgttgctacctgtggtcattgaggctacatcaactacttctatttccttgtaatgaaaaaggtgaaatacgcacgtagtttagactcatccgttgcctgctgctgtttattgtagtataatcaagcgatattttgtgattatatggaagaaatatacacacattattacttaaatctcctattgaaagcgtgttcacgtgtaagtaatatttatacgcaccaagatttgaaataatcatacaatcatagtcatatgactttatcgagacgaccggtgcttccctagaatcaagagatataattcgatcccaggaactgtcactactataaaaacgattttcttatacacagagctctttagattttagatggaccgtaactggtcgtgtctgcaacaatcgtcctccattttcgggtgtggatccttaagaggaccacacgggaaaatcgattttcacaaacgggtctcttaagtggaccgcacgcaaaaatacagatttttttatcccatcccctctccctcttttccctctcgctcatttcaaatttttcacctcctctctattcctttcccttttattcactccctcctctctctctctctctctctgcctcacctctcctctcctctcatcccctccgagcgtgcggcacgtgggatgcgggaggcggctggctcggcgccgccgtggccgaggcggccagcaggaggcggcgcggtggctggcgaccggcggttgggcgtcgtggccgggaacaggcggctagcggctcgggagtgacggtgctatctgccgcgcgcgcgcgtgatggccagatctgcgtcgccgcctccaccgagtaagaggtggccgggagcagcgccgccctccccacgcaaggtggcagcggatctggtggtggggtatgcaggcggcggcggatctggcggtggtaaggcgtagcggcagcagatccggctcaggtgacggcgacgggagcgggcagaccaggcgacggcgacgatgaggatggtggcaatggcttctctagggttagggtttcggatatttggattttctttttcggttttttatttttgcgtgcgggcaacataagcacccaccttcagggctatggcggccggggggggcttcctctcaatccaagcacaagactgatggatgcagatccgccttcgccatggtctctctaggcgccgaaaggggatcagattagggcttggcaaccagataagattagttggtgatcaaggagcttggcaaccagataagattggttagcgatctaggattttggccaggctcacatcgacctgctggtgttgtggttaccaccagcatgtgcacaaatttcagcgtttcgacgacagtgcccccatcaacatgggcaataccatggatcgtggtacctactcatgctacgcaatccaaccatccataccatcgtccaatggggatgactgcacatggatgaatgatgttgaacaattctcgcctgccaatggcaaatgatcgacggaaccttcgggtccaagaaaggaaccaccccactctcctcaacttggtagttgttcctttcatgtctagtgcaaccctcattctctaatcgtggggacagccgcctgctaggctactagcgatcaactggagatagctacaagagtagtggctttttgcaggattgggaaaattggtcatgggcaactaaggccgattcggcagtcttggccggtcatgagcatgtcatatccgactgttctcggtgaccactgttgttggaggcatatgtttgttttggtgagctatttggtaatcgaacggggccatgaggtccagtgagataactgcgggtgaaaatcctaatcctatttctagatttggcaatgttgttgattgtatgttgtctcctagttgaaggtgtcgtcttagacttggataaaaatctagttccggttaaagatgatagcggcagacatgcgacagtttcttcttgaaggctttgttttgaagtaggtttatataggtctttgtatttattcggtgactgagaattttttttcctctattctggctatgtgcatcctagtatgatggaagaagatgccatgtgtaatttcatttattaatatttttcttcccattataagaaaagtatcgtcatcctcctccctcactatctagctccccatataaaaaaacaccttatgaaaaacctccccaccaaaaaaccagtattttcacgcgaaaatcaactcgacaagccgcatagaaaaaaaactaaatccattaattccaatcccgtataatgcatgagcatgacaccgggtttggctcggttttatgtggacaatgggcagaatagctatattaaggctattaggttagctagtttggttggaccggcactactaccaaactccacatccataaaaccctcataagtatcggttcacttcaaaccaacacttttgaggaattttccggcgcaaacgagcatttttaactggatcaaattaaaaaccggcacctataatcactcattggtgccgattcataataaaaacccgtaccaatagtcataggtaccagttattataaaaaattggtacctatatataaaacaatagtaccggttttataaaactagcacctatatgtgagagataggtgccggtttttataaaaccgacagctatgaattgagccgagtcgaatgcactgacaaaaatatctcaagtagtaggtggtcggttttctaagtgtggtcgacctcttatctcccacattctcttctcttctggatccatctaggcggcgcgggggggcactgccaggcaacgagcgggggtagtggccggcaggtggcacccctccatcgaggggcgggtggccggtcggggcggtctctgccgcgtcgaggggcggttggtcccggtcgacgggcatcccactacagcttgatgggatcaggagctcgcgcgtgttgtcgctcccggtcgcgctctgcctccctcccgcccccctctcggggccttccaggtacggccgccatgagctcggcacagtatggtggcgagcggcgtcagtggtggcgttgttctcttccttgaagatcttttttcctcgatgttaatctatgcatgttagattctgtaattttgtgctttgatgttcttgaatatctctcaatatcggggtctctatatatgttgttgttattgagtggtggattggtggtgtgtggatgttgatgaatatgttcttggatgggatgttgttgggatgatagggagttgcgcgatgcatcagctcaaatcgaaccgacgcatccatcgagccatttttttttattcgtgagaccttgtttgcgtgatgtgtcgttcctaaacaggcacctatcatttctcctcataagtgccaccttggggatgccggttgagaaaccgacatcaatatgggttttccaattggcacctataggatgttctctagctagtagtgtgggttctagcattttatgcatgatgtgatctatgtaactacatgcaacgaatcaaactccaactaattaagaaaatgtgttagacatcatcgcaaattaaatccacacccatgcatgattcgtgaatatatatatatatatatatatatatatatatatatatatatatatatatatatatatggaaagattagtccgaaattaatcgttgtttttttccctgcaaagaaaataatcacgcgctgaacattaagcgtggatgtaaataatcgctgagtaatttgtaaagagatcttttagttgtcatataaacaaacaaaaaaataaaatggtttcttcgctgtgtacactactagaaaaatcatttttcccgacgtggaggtctcattttcgcaggcggatatgacccttagagccaaatgaccgcctacgaaaatataaatcggggtgaaatttgatgtccacttaagcggcgcctgcgaaaatcattttcgcagggggagcacttaaggggcgactgcaaaaatcattttcgcaggcaccgcttaagtggtccgcctgcgaaaatagacttaatataaatacacgcgggcggcaattttttctaagtcctcagtcctcccctccacacctctcctcaccactggcccctcccctcccctctcctcctctcccctcccctcacttctactctccctggcggcggctcccggcggcggcggcggtcggtggcggcgaaggggcgactgcgaaaatcattttcgcaagcgccgcttaagtggtccgcctgcgaaaatagacttaatataaatacacgcgggcggcaattttttctaagtcctcagtcctcccctccacacctctcctcaccaccggcccctcccctcccctctcctcctctcccctcccctcacttctactctccccggcggcggctcccggcggcggcggcggtcggtggcggcgaagggcggcagcggcgaggaggcgaggcggcgcggccgaggtggccggcggcggcgccgacggcgtggagcggcgacggcgtgggctaggtagcggcggcggctcccctcccccctccctcccaaatctggccggaggagggaggggggaggcaggcggcggcgacgatggcgcgggccgggcggcggcggcggcggctcccctcccccgctccctcccagatctgaccggaggagggagggaggaggccggcggcggcgccgacggcgtggagcggcgacggcgcaggctaggcggcggcggcggctcccctgcccccctccctcccagatctggccggaggagggaggggggaggccggtggcggcgccgacagcgtggagcggcggcggcggctcccggtgcgggctggcgtttttttttttcgtttcttctattttcgcaggcgggccgttgccccgactgcaaagatgaatgattttcgcagtcgttatggtgcaggcggacctctctcccgcctgcgaaaattagctttgtctacttgcaaaaatgatttttcagtgatgtccgcaaccatcatgcctcaccgatcgagaggaatgatcgcacgtgaaccgccagtactcgtgttcagttcacgcacacacgaaatatctacgagagaaccgcgtcaaagtaagaaggcccccaaggcaataattgactatggaaaacaacatcactagattatttcctgtataacaatgccatgtactaattctataatgctcttgaaattaaggtcaccgttaaattggattaatatatgcacacgtacgtggcccttgatccggattacagccggccggcccatgtctaattgtccatcattgccgacgatatatactactcccgtaaaacgacacaaggttttttttcaaagggttgagttgaatcgaaggccgtgatgcgtgacgccatacgcgacgacggcggcgcggcaggcgtagatagctagcgagcaagcaggaagaatccatggttacgtgcggtacgcgtgccattaatttgacggttgagaactccatccggtctcctgtttgatcgatcgtcggtcgagcatttattatttcttgtaccaatctgcgcacgtacgtacgtaggctgaggcatgcatctatatatggctcgtgcgcatatatacagcacctacaaaggtgacaatcgtacgtgcgtatgtgcgggtggaccttagtcaaacagtgaactcagcatatatatatgcacaagaatttttcccttgcttgatttgtttatacgtacaagctagtgtgtacacgccgcaacacatgcacaattgcacaaacacaaataaagaaataacatacgttggcatatagtataagtcaagttttgatataagctattagtaaatatttatgcttgaaacatttttttctactattatctcgcagtagcactaacagagccaagagcactaaaaaataaggcaacaagtagattctactgaataatgattatgttcaaggtaaattatttcagcggtggaccatgatatatgctacctaagtatttagttcgatcgggtggcctcccacctacctatgaggtgtgcctctactattgtgtttgttatcttttgtggagatagaaaaacatatatatggattgtcgacctagttgtgttggtcgtataggaactatttatattgcgttgagaagtgttcttaattttagtagtcttcctcacctacctgacattaagtacaacctccaaaatctttttatatttgtacacaacataatctctttacatttttttcccaacgtgcactccgtctgccttgctaatgttgggccaccagttgacgcctttgaaacatcaccttcctcactttcacttccatctacctcaaacccctccatgcaatctgcctctccggcccgttcccctctatgcttgatcatctttgtcgatcgagcctttcgtcacattgcaccttcctaatctccatcattttttaggaaataagcgtcatcattcacatcctcgcaccatttaactttcctacctacgtcacgaaacatatatacatcctcttcttttatgctgccaagatggtgacaaacaaagcctcttgtatctaaagcccgtccttcctcccttttacacatctagaacactaatttaatgttgtgctaccacttcgtagctatttgcaataagggatcttttaaagcattggcggaaccaaaactttctagagcccggacaaatctaactgtgccaaagatttattgtgaacttactattatctctctccataaccgcgattaaacttggcggtttaaccgcaaaaaaaatcaggtggccgccaagaaaatttcggattcttgtagtgtttgccaagcggtgaactcaccactgttgtgaggagcgctcatcagagaagccacaccattgtcactggtaagcatatccttcccctccaatggttagagggatgaagaagcatggtaatttttccctatttttaatataatttatttaccgtatggatttctcctacaatgttttccttaagaaaaaaacgaagcatagtaagtaagccgtttgattgggatcgaacagccatcatcaatctgcttatattttctcatcaacagctaattaaaaaaacatgagaaacataatgccttctcgccacctcctagccaggggcggatccagcataggggcagcggggtctcgagccctcactacttgcatgaagattatgagagcccccacgaagataccactaaatttttttaccatatatagttagaaggagggctataactctatctagtttattcagatcccactgctatttatttctgtatcagtcactgctcctgcctccctgagtagcttaattagaaatgccctcgtacttatgcttgcaggctgtagcactgtaggtcacaatagcgaaaattttcttgtcccaatccaaaagtaagtcggcttatgtgaatggtatctcgtgtgctcacagtgcacacagcacatatacacatgcgccgctgatcggcgagggagagatggatgcggtaagcccccgcagtctgtggacccaatccacagccgcttgacgacaccggccgctctcgcctgcgtgagcatttctcccccatcaactctaccggagttatacactcctcttttctataattctactacgaccctcacttgtctcactctgtacatcagactgtacatttctgtacatgtgaaccctgatagatacgtatgcgtaggcatcggaaaaggggtaaataaattaaatcgacttgtcccctgaataaacctaaggtaaaaaggctgtttaaaaatatatagtagcagagaggagagagcatatagtagagtgtggaaagaaggaagcaaaagggggagagagaaaagtatgacaaggagatgaaagaaatcagacaacaaccttcttagcctcctcctctccactagcttcttctcccttgccatgagttccctagtagaccaggactagcaggcaagagcaagcagctggaagagtattagcagcatgcagctctagagacgacaggcacagaggaggggagaggtatggagaagaagctaagcaaagctcttgtttttgctttggttctttagtttatatacgtcttgggtttgggtgtttgcgagctttttttttcttcttttcctttgtttctgagtgtaactgtttgtttggatttccctgcgcactttgttcttttgttcatctcggacgagccctaaccctttggagtttttccccagcttcttgtcgattcctttgttgttgtttcagatcgattccaagcagatacttacataagtattgagaggtattctcatccctttctgtttctcctttctgctcttttcttttggttttatccccatcctccttttgctagagaactttctgacatcttctcatctttgtgtgcttgcatgatgtgtagtgtcaatcttggttgttcttgcttgagtttgttatcgccatgtctcactcggacactacagcttcttgcagtgacgggaaatcaagaaaagaaagctgctactagcccaagccaaagctctacaagaagggaaaagattcccttctgttcttgagtagctagcttcgctcgagggtaattaaatctgagagcggccatggcatccaactcatcagcggcagctgtggcggcgttgtttggaattagggatggcgaccatgaggaccagattaagccgctatttgcccagcagcagcaacaccaccaccaccagccacctatggcgccatccaacgccgcggcggcggcttctgcggcagggtcggcggccggtcaagcggccgtggcggcgccaccagcgaagaagaagagaaccttaccaggtaatccatgcaaagtttatccctttttttttgttcagtttcagactttcagtcatgcatgcatggatgccagcatagcattcttctatctccttgctgatcttgtctcgatttatcggttggagcgagtttcaattcctttgttttagcatgcacaagaagacagctagctactgctagcttgtccaagattcacatggtttttgtatcgattttaccgtgtttgtctagtgattttttttcttggttttgaaatttttgattcacatgcataatgtcttttttggaagggatttgtacgctagcatagagtccaagatttggttcccttggatttaaattacatgaaatggtcctatatcttcttcggtttctaatttctctctcttctctagcttggtccaatgaatttcttacgcacctggattgtagtcacccagcactacttcatttaaagcttgtagtctcacctggatgaatagtatagtcctcagttcaggtgaaggtacaaagcacaaaatgatttcttgttttttttttgtttttttttctcatatgtcattataaatcagacttatttttcagtagatagattggttcccctaattatttctttaccgcagtaaagttccttaattcaaatagacaatcaccatcatttaatcatcaattaatcttagagattttttgggcaagattccatgtacgtgagctgttctcctcttcacccttgctggcctcttcctttctcttaccaatcatgagagatgcagatacgggccatgacatatgcacgagcaatgtcaattcatttgttccctacatgcctcttgctgcaaaattaattctcttttgccccccccccctccttcataatctcgtgcaaatattctctttttgccttaatttgtccctggctactaaaatcaaaaggaaaaaaaatcactactccccattacaaatcatccttgcatgcctaaccgatcttcatcaccataaatctactccgattgggaaattctttcgtgttaagaaacatgcatgcgtttgtcatcatcagccacactgcaatttggttttgtcatcagtagtgcggcaagctgtactccttatttctctctcttctaatccccacataatgttaaaaccaccgtgcatctatatctatatatcgatctaaattaaccattcacatatatgcatctaatatttatgttgaactaacattttgatcaggtagtgcagcgcatgcatatgtatatactcctatcttctaattaatactactttgcactagtactaataagctgtacttgcatgcattgcatgcgcagacccggacgcggaggtgatagcgctgtcgccgaagacgctgctggcgacgaaccggttcgtgtgcgaggtgtgcaacaaggggttccagcgggagcagaacctgcagctgcaccggcgcgggcacaacctgccgtggaagctgaagcagaagaacccgctgcaggcgcagcgccgccgggtgtacctgtgcccggagccgacgtgcgtccaccacgacccctcccgcgccctcggcgacctcaccggcatcaagaagcacttctgccgcaagcacggcgagaagaagtggaagtgcgacaagtgctccaagcgctacgccgtccagtccgactggaaggcccactccaagatctgcggcacccgcgagtaccgctgcgactgcggcaccctcttctcccggtaagcccacactctacccatctctctactacgtatatatgtatggtgtttttcgcagcttgatttctccatctgcatgagacgttgcatgtgtgtgcgtgctagctagcgaagaatgtttagtagtgtgcgcacaaaaatggcagcatgcacgttcggccggggttagggttttgtctgggtggtatagtgtagtactttaactaatctgttcacgagggttaatggctagtgggaggagaagaattatcgatgtcgtacacacgtgtacgtaccgcgtggtctgcaggatgcatatgcatatgtatgggcgaagagcattagggctactgctcgcacgtgatcttgccattgtcttgctgatgcaaatgtttccaagcgttcttgtgctggcatgcatcgtcgtcaagcctggctgaaaaggcctcccgtctcttcctcatgctatatatattacaagtcacacaaataaacgcgatatgtttatatatgtgtgcgcgtgtgttatactgattcatggccccaattcgggatcgatatgcccggaacgtcgacagctagctagcacattcttaattcgttgggctgtctgtctattcatcagacaactgaattttgaaatatctaagcggtcagaattattccaagatccgtgcaataactatatatatatatatatatacatatgtaagagcatgaccaacagttctctaaatgttaataattaaatatacactgtaagacactctcctacagttttttccttaaaaaaagacaatgctcctaaataaaatccaaccataaaaagatgggtttttctatgaaaattaggatccaacaattcccatgtagagatgataaaaaaaatttagcatccccaactccgtttttatcgttctccacatctagggaatggcacacccaaaaaactgatcatgcgtgggatgagagctatcgagatagcggcatggaaggtgggcgagggagatcgcccatgaggagagaagggcccctttttattttaggaaattaagtttagactatctgttatagagatcaaggtatattttatatccttaaattcttattagagatttcaaataagatatttattagaggagaatattggacatttgttggggatgcaataaaccacttcgatgcccggaatcctgatccatctctcgcctccgctagctcttcgatcgatctccaccttattggaaggcgccagaaattccagctagttgtcctctccatatcaaatcctccatccacaccatagcgttattattggggtatatatagcttcatctatgatatacagctcatgcagctgaagttcggatgtcgctggtgccaagagggcttaccaatgaagtcactagtgatgttcttagtgagtcatcctgttgcctccctctcttcctcgcacctctctcggtcggctagaggtagaagatgcttgccacttgtcgaatcgtcggatcaagatcttcatagatcaattggccaagatttaagaaacaaaatcccagtggactagtaaatagaaaaattgtcgtccatatatataaaaatataattaaacaagcttatatgtgtggcactacacgtctgcactatatttttattttaatgaatcagcgagccgtcaattttattgaatatagaaggagtaaattgtacaaaagaaatgagctgtacacgtctgcattatacacccccatatgatcgtaattggctaatctgttttgagctgccatatagaagagtatggatatatatagtctttcgctgtgtatatccacccgtggattgagccgactttctatttatatctaaaaataatataatgcaaactataacttatatcatgcagaatatgatatgtgaatgtgtgtgagctggccggctagatagatgtgcggtgcagggcctttcgttggccttacgtgtcagaagagcctgtggttcacgcttcacacggcttagatttccctcggatacatgcatactccgatccaggcccttacatctgatctcacgagtcacatgggtgcaacttcgcttgctagcagcagtgtcacgcatactgcagactctctctctctctctctctctctctctctctctctctctctctctctctctctctccagaatagcagcaagtgttcacccctatctttcacaactcgagcattttcctctctggcttcatggcatgacctctgcatgcagagttcttagcatcaataattttgatgcaatgggggcctagccctatatatatgtgtaggcttttgtagttttgcatgtgttttttcatccatatatattcttgttggatcaccctttggttccttggaaaatgagctttttacaaagtcttctcatgtctccgggcgagttggcgtgtgcgtgtgctactgctctctaccatggcgatgtccaatatgtctactactagtactagctagtagtagaatttcttttcccagccctttctccttggaagcttcttgcaccatatatattaattaagaacctatatatatcggtgacgccatgctatatcaatctgcctactcttttcctcgttttcatccctgattgacatgagtttctgggatctcgagcttcaattgagtgtgatagaagtcaagtgatgaaacgaacaggttttagtcaaccccacacttgaaaacatgtagaatcactggtagatttagattttttttctaaaaaaaagatttataattttttaaagtacatgcaaacacaagtacgaacaattatatatcaatgttattgaacacttcaaatacaagacattataaaaatgtgattcattgacaaccctgggtggcctaggagctacccggggtcgctaggcatttatctgcaccttggtagaagttgtacatattttgagcctttaaaggtcattctaaaataagaaggtcattgccctccttttgcgtgtcgcttacataatcaataaaacattaataacgtatattgggttgtcatatagttaccctacaaatatgtatgttcaaacttaatttgaacaagtgggaaaaaatataactgcgggaaatacacacacacactactttaatttcatagttaattaggtttgttttttctttgatgtaaatgaatttggtcgtggatgtctgtacagtaatacatgcatgtgacggcataatctatatggccaaatcttgttagcttataactatttagatttcatacatgaaacgagggcgcgcacgacacacattcttgatttaatatagcttaaaatacttctcccaagattttttttttcggaatactaacagtaggagttgttacacgcaatagataaaattcacttacttgtagaagaaagaattaaagatatttcaacgatagtatatcacacagttctactgtttagacgaccattatttctcgtacccacctcaagtcatacgcacagtgtacacacattcatgcatccttgccaattactgtactagctagtactccagcttgtaactttttccgtacaaatatatggtcgtcctgtgtatggaacttggaatcttatcggttcaaggcaagaatggaacgtacgtactacgtctcctaaaagatgcaaatatataattcttgaatacacattgcatctaattattatagtgcttttttgcatggatttctgtactgttgtgcttaacatgcaattgattagagaaaaataatcattttctcgggagtggattttaaactctcgagaggatatcccctcgttatttgcatgcaattcaaatagttacgaaaaaaatctaaataaaatatgagaagatgtattaatatgtgatatatcgctccacaaacatgcaagttaaaattcaacttttacatgtcgtaacgaaaaaaaataaatttaaccatgaatatgcattaactagctataatttaattttttttcgttgtgagatatagaagtcgaatttgagcttcatgtttgtggagtgatatatcccatattaatatatcttttcatttttttaaaaaaaacaactagactatttgagtgacatgcaaacaattatgggacatccttctaagagtttagaataaaaatactattttctcaactctctttgagagtttgaggagagggggattgagaagattgggaagatacacaaaacgaggtgagctattagcgcatgattaattgagtattaactattttaaattttaaaaatggattaatatgattttttaaagcaactttcctataaaaaatttttacaaaaaatacaccgtctagtagtttgggaagcgtgcacgcggaatacgatgtccttttctcacccaatcccccagaactcatcacaaagaacgcagccttagttgttagtatcgatatgatcaatgccttctttccaatatatagtaaactagtcgatacaccgctttttgctgcggaatatgtcgatgaatgcatgttatatatcatagaaatggtaatgtatatgtttaaataatgtaaaaataatgtggagatattgatttgacattgtttgcatattgagttctaaaaatacaacaaaattgtataagtcttttgtttttttctagtcaacttatttaattttgaccaagtttatagaaaaatataatagtatttaaaaaataaacatattattagaatatatcaaatgttagatttaataaaattaatttgatattttagatgtcgctaaatttttctatacatttaaaagaaattgacgagggaaaaaaaatcaaataacttaccgtataaaatagagagagtactactacatttgcacggatgacacagcaaaaattttgcatctagctgtctagctgatgagcaccacttcacgtgatttctgtatcagtacccgatactgtagtgacatgcactgtccttcgagttatcttcacttttgcgtcgtacaatttcacgtgcaaacttgtgccgcacggacagtgatcagtttgatggtacatcgcatgtgtccgtcgtcgtccatgcaaatgcaggagggacagcttcatcacccaccgcgccttctgcgacgccctcgcccaggagagcgcgcggctgccacccgccgccgccggccacctctacggctccgccggcgccgccaacatggcgctcagcctctcccaggtcggctcccacctcgcctccaccctccaggaccacggccaccaccaccaccatcacggcgcctccccggacctcctccgcttcggcggcagcggcggtggcgccatggctgcacgcctcgagcacctcctgtcgtcgtccagcgcctccgcgttccggcccctgccgccgccgcagcagcagcctccggcgccgttcctcctcggcgcggcgccgcaggggttcggcgacggcggcgacggcagtggtccgcacggattcttgcagggtaagccgttccatggcctcatgcagctccctgacctccaagggaatggcaccggcgggccgtcgccgtcgggtccgggtctctacaacctcggctacatcgccaacagcgcgaacagctcgggtacttccagccatggccacgcgagccagggacagatgacgaacaccgaccagttcagcgaaggagggggtggtggcggcggcggcggcggttcagagacatcggcggcggcgctgttcggcgccggtgggaacttctccggcggcgaccaccaccaggtttctcctgccgggatgtacgcgaatgatcaggccatgatgctgccgcagatgtcggcgaccgcgctgctccagaaggcggcgcagatgggctcgagcacgtcgagcgcgaacggcgccggcgcgtccgtgttcggcggcggcttcgccggctcgtcggcgccgtcgtccatcccgcacggccgcgggacgaccatggtcgaccaggggcagatgcacctccagagcctgatgaactcgctcgccggcggtggcaacgccgaccaccagggcatgtttgggagtggcagcatgattgacccgaggctgtacgacatggaccagcacgaggtgaagttcagcctgcagcgcggcggcggcggcggcggcgacggcgacgtgacgcgtgacttcctcggcgtcggcggcggcggtttcatgagggggatgtcgatggcgagaggggagcaccatggcggtggcggcagcgacatgcatggcaccttggaggccgagatgaagtcggcgtcgtcgtccttcaacggaggcaggatgcaatgatctcttaagcatatatacgtggcacgttggcatcaacatgcatggcaggaataagttgttgatttgcaggttgcaatacaatgctgtgacttgtgacacatgtgatagatgtttttgcatgcatccatgcaaaaggataaagccagctttgatgatgatacaatcttagcgagagacatggtgagcagaagagcttctcctagactcctactaatgcatgatgaagctagatcaacaggaatcatgagacttgagctgaagttaggcgttattactgcaatatactattctgttcctgatagatcttattgctaaatttcatttgaaagaataggtcttgctaaatgtaattgggttaattgtactggatcagggataactgcaatgagactgtattatcttcttctttcttttctgtcagacgaattataggtctgtgggggataatgagacttaattaccctactgatcttttctattttttgtcctctttcagtcattcagttaaccctctagagcaaaaatattgttcttgcaattaatgcagttaatcatgatatatagtccatgttgtggtgtatgtcgtttcatgttaattatgtcatcaacgtgtcggctgtgttgctaatatagatgggttatgtttactgagctcgaaattttaaaaagtagccgatgagaaactactagatctttctataacttctgttgctagtttatttcgaaggtatatagctacaatttccaatataactttttttgctagtttattcttgggttctatctatagctactaacattcacaatcaagacgaataatttaggttgttttgggagctagctggagattcttgaagtagctacaattcgccaaaaagcttcctaaaacaggtccataatccctgaagaagaacaagaaagaaaacaaagctaatatatttttatttttctccctgattataatcgattttttttatctttgtactattgttttcattatatatatacgggatggataaacaaacttaataaaaaatgattccaaccttttttttttccatttcctgcaactacatttaggtaattgttccaatatattcaaggggttgcaaaagggcctgtaacctagtggtttccagtatttaacggctttgtgtttttagtggtaggcgatgtacccgttgacagcgagacgtctgtggtgacttcgtcaatctccaggatttgccggtccagtcttcaaagatgctcataggggtagggtttacgtgcgtgcgttcatggggtgagtgtgcgtgcgttgtactgtgtaattctcaaaaatatatatatacatatatatattcaaggggttaattattttgcgactcattttcatttttatatagttagtatgatattcttttacccgtgtgtgtgcgcctatatatgtgattttgtaagattgataaattatgttaacacctagataacttgcaccaaaaggatctcttgaaaacaggagggcggtgcatgagtgtgatctaaagtgttgttgaataaaaatgcaccagtagaaatcatcacccaactcaggccatgtttcattttttgtttttgattctgccccaacaattaattttgaagaaaaacaaatagcttgattccggaaacagattagcaaaatcaaatcctgttttttttcttctaaaatccaaaagcaggatattgagctatttgtggattttgggtaatgatgttcacggcgagtattgcgactatttccaaatccacaatcaatttaagaacttctaaaaatcacaatccagaaaccggattatgtgaatcaaaagaaaaagaatcagggcctcaatttgctttaaaatagcttgagatttcctatcttatatactacaatttcaaagtatttttataaatttgtaataaacatataaatcattaatgatcacatcattcaaaactgcaattataactttctacattggaacatatataattgatttcacctagtacaaatctagccaacgttgttaagttattaaatattttgggataacgattgggttacatgtatatgagatatatataaaaccattgaaaagttataatagatatgcgattgatcaatatgaaatgtgatttttaagtcctggaaataacatttcaaaccattatccttttctgaaaaattgtgagagaattatatggtctatatattaattttaatattatttgggatttgaagtatttcaaaattgagtggatttcatagcctcaattaattctcaaaaagttggtgctttctgtgcagatctggtcaaattattaaaaactagagccactttcgacctatatattaattccccctctcaattatatgtttgacttctgtctcatagcgcatcactcaactaattaatgttcgaatttttttttggtccaaatgaaaattgaatgattccgattttcaacttgggatttaagtttcaaagagtgttttgcaacaacctcaaagacagcacgccaagcgggaaattcttctgacatgaaggttttgcttggggtgagggcacttgataggttctcgcatacacttggctatatatgtagcgagcaggggaactaagaagaatatatagctcatggtcatgcaatgacgagtttggcggctagctctatcatttgtctctaattagcttatcagttatgcaaaaaaaataaatctaattattttagagttgtttttattgtgtttgtttttatgcattaccttttaaatcgctaattaagaacacaaattaatatacaaattttacccataataacttttagttttattgcgttgttcattttccacggatgaaccgtagagtaaatgatgggtgatcgtacgtctgggcttggtactgccacaaatgattggctgcttgttgtggcgtccgcgagctagcaaccttacagctttatccataaaatagcgaaagcgtatctagtgagatgttatccacaacttaatttgccaactagactagttcatcataccgttgattggtttctctataatgtgatctcactgtctcggagtactcctggtatttttctttcaaccggtcaaagaaagtgcatatattcaaatttaattaaaattttgttcagattttgaatttatctcgatgagattttgctcaagatagaggccggttagctcttcgctggcactcctcaattaggttttgaagagagggcaaggagaaaaatgaaaaaaccgtggttcctatcgctatcttgcatactacggcaaccgtgtgacgcagggcgtatacaggacgtgacagcgatgattccccgtggtggggggacaaggtgttcgatcgttcggtacatgcctgcctcgatcgacgttgatatttcacaggagaacggaattagacaaagtcctcgagtacattctcttcttaattataaagtagggcatatacatatgcatgagtacgtccctaattccatttgtgcattaaaaaagttcagcacctagacggcaaaattaattagtcaacaatctgcaagcctcgatggcgatctctgcacgtacttttcgttggtaattaaagggtagcgcccaagttaatatatacttatagggtttgcttgcacgaagctcgcgttccattctgatgataattctgagggaaaacaagtgaatgtttggtagctggtgaaagcgacctttcgagatcgtctgtcgccacaggccacctagtggcgtcgtgttgcctgtatgtgtcgtgtccgtgacagaatactaatgatacagatgatgacgagcttaagatttggcacagtatacagttggtaccatatatgctttcaaacggaaggataaaaagatcaaaagagtagagtcttgtgtaaacagcatgctagaataatagcagacagctagaagagttctgcttgataaattgtttgtccttaatgactaatgcacttgtgtgtacttaagtgaaacaatcatggatatcatcggacgtttgtaatggccctcataatgtctaatcgatcttcaggaaaatgatggatatgctgtaccttttgtactagaagcagtacgcaatgtactatacaataattatggtgattgcaattctgtgttagtgttctggaagctctcagagctacagaaccaaattataattacattgcccagcccaactgccgggaacaaattaagctgttgctaaacttcctttttactaactgcatgaacctgtagaaagcttttgctcacctaacacttgtcattagcttgtgccaggttaacaactctgcacacacacatctgcactgctgctgatgtggcgcctgttttgtttgtagcgttgtcgcagcgtgccttggcctggatgcacggcgagatccttcgcctatagccaccggctgataattgcgcatctatactactataatatatcgcccacggtcacgggcgtgttctagtttctgagggccatatggccgggagaatccaatgtgtgaatatatgctggttaacatatagctttccagtaagcaaatcatagtgcaggagaagggagctgtgtgatcgctgtggcttcttctgtaggccgttttggtgttatgctcatgaaaacttcagaaacaattccagccgtgggtgcaaagcaggtgttgggtttgtaccaggtaggggtctgtctggacgagcggctggaataaattagtagaatataccatgcctttgccgtgtaggtagatgtagcaaagcaacatagctagtgtagagcgctcaggtacagaactattacatgttgactaggaaaatgtcctgtggcactgtataggatagttgctctgcatgctcagacaaactatttggaatgtatgtctttggaaaaaaagaataaaaatgaaagcaatcatacttagagctgtctaccatcaaacaactatttcaaccttgacattatttgagcaaaagtgggctaaactgcttaatgcaaatctagattctatgtaccaggagccaactaagcaataattttgtccgagacaaaaggctaataatccttgcgaatcaaggtgcgcatccaacaagtggaaaggaaccgcagtagctgagatcagcttgtcctggaaacatggcagcaatgtaattgtcaattattacatttcttcgacgatatgatttgagtagccacactgaaagagtctagaatcctcaacttctagtgttgataatagataaacaaccagatcatggtcgatagttcacagcaccacaatcattaacgtacacacactataggtcgttccgtcttagataacagggggcgactcaaaccgtcagacgttttcccccatacacaaatattcccaaacttagcagtagaacatgacacgtttgacattttccttcagatcaggaagcggccttacagcaacattcccagcaggcttagtgctgcgtgcaccaggaagggggccaccgccacgggtatgggcaccgctcgccatcgacccactatctgaagtatccggctccatgtaaaatcgagctcgaaatgccgcgagatgggcataatatgcaggaggaactgcagaaatcaaatccattgtaagaatatgtagccacaccgagggaccaaggggttaacgttttctaatcaggttaaatagaggagtcatctgcttaccgattgatacggaacgggtgcaccttgcatagctgcaataatagggttacagggacaatggttagcttactagtcttgtaataatgtactcctaaatagcaatatataatgacatgaaagaaaattacgtgtagcacaagttgtttgtcagagtttgcaaaccatcagcagtgaacttgttctcatcccacagaacatgataatgtgcagggcgacttgttccctaaaaatagcataaagtaaaatcaagtccatttcatcttgtaaaagaatgttttttttgttgcggagaagtaatatttgtaagtgcagaaaagctgacctgaatgcccgcatggctacacaggtagaaatcaaactcagtaggatggcatatctttgaatcaaccacggtgcctgaaatcagatgaacataaagaaattaaattcaggtaaagaaatgaggtgtcaatcatagggttaacaagatatacaaaataactaaaattacaggaaggcgacaaattacctggtagtatatttccacttctgtcaacagtgcgctggtccttgtggttattagcaaacagccttgtgtgatgacgcttctggaccaccacaaaggtaacgggtggctgataatcggcttccaaagatgcacatgcctagtttttattgaactgttagtcggggactagagagataacttcatggtgagaagaaaagtagataaattaaaatcacctttctaatggcatcaagctcataaaacagaacctgataaaactgtccttcactgacaccatccctgaaatgagagatgttaaatatgtggaaaaacagtaccaactgaatatgcagttgtgcacaaatgaagaaaattacctgtaaaatataatcctctggggtttctgtccagttgccctcttgaaagaaatgagaagctctctgcatatttaactaatagaatttatatatgtactactaccaagaaatattcaggttcaatgcgaactaggacatatatacctgatcattccaccacttacagttcctctttgaggatctttccatactttaaaaagatcctgtatcaattcctgacgatgggcctgtgcactcactaatccggcatatttggtgacctcaggccagtcttgagaagcaacaacctgcatgaagcatgaaatcaccaaaaacaatcagaaggcaacgcaagacataaaaaaggtcattgttctatcatatgataataaagagacggtatgcgtaacattgaaaagctatgcacttacagctgcaatggaagggctagaatcttctccaggatggggatgtgtaacatcagcaccaaaaatgatcgttggcctatcactcacaaggggaatcctccttgtcaaagcatcaacaagtactgtatttcttcctcccacctataaattaaaggaatataaattactacaaaataaaggtaaaaaactacaaaatcgggcaaaaataattggtagaacatttccgaaccttaacattgattttaagggcaacgtttgctaaatactgtttgctcatcttaaaaacatgcttcgtaagacagcattgcgagaccaatccaagatcagtctcacatatccttttgagatcgcctgaggattgacaagcatattaataaagacttttttatcagataacaatcaagtgttgttttgaaataaaaaggcataccataaagagaaccattattgtcaggcaatattgcaatcagcaggtcaagctccccgccctgtggtttcagtatattcatggcctcttgatagcgtgccttgagcgctctttccacatgttcaggtcttgcagtcactagaggaaccacaggatcaattgagaagtcctacaacgagaggatatgaagcatgtgaaaggatgttatggtccaagaatatacagagtcaaatagcaacactgaaagagatgtctggaggcaccattagatggaagaaaaacttaccatcccagatatttggcacataatagcaagctcgcgacagaaactcctagcagcattatcttggacatgacgagaaaaattgatgcatgtccagttgttaactctaccaccattgaccattttctgcaacaagcacattaaagaaaactaattgtcgcaactgtacgcaattatagttgggagacatcttgaaagacggcaaagcaacagttattgaagaacagaagaaaaccaatttttttgttggaaaagaaaaaaaggatagcctaatactgtttttaggggatgcttcgtataggtttgttttctaataactcacttctaaaaccataccttattcatcatattccattggccaattcttggcaagacatccttctctctgccactatcgtggtacttaagctgcaaagaatattagtcaaatattgaggcataacatacaaaaggcatgagatattgacaaatgtcagccatgtcttgaactttgatcttacccaggggggtggtagaacacgagcttcaacagatgcaagtcgctcatcgatccttatgccaaactcctgtgcatatggatcctgatggtatgcattgtgatgcacagtctggtcatcaaagacaaaacaataaaattataaaacttagaagccgattctgatgttccaatagggaacccgattaatggttatatatccaagtaacacaaatagatggtgagctacatttgaaatgtgttttggcataacaattgacatgaatcaaaccaccttaatatgtaaaaacatatagaaacagtttaaatccaaaattaaaatataacgaggactcaactgtgggtacaatagcaaagcattggatatttgagtaagaactaaaaaaacttgttttagagttcagacccacaaaaaattgaaataaggaaaccacaaaacctttacaaataaagggcttgccaatacataaggcaatacaaactctagatacaataacaagtgtttatacatactcaaatactcagtccaaaaagagtagataaaaattttacatgatattggaagaacttatatgcatggcctaaaatgcatatggcttaataaagaaatagatcaccaaggcatgaaacaatgaaatagcacagttttatagtacaacaatgttatagggcagttggaagtaatctgccaacaaaatgcacccataattacctgcaaaatgtccagctcacgctcttgagggcgctggcaggtcactttaagaagagcagttatctgcttctcatttagtctttttgagtaacgctgtccctccacaatcttacagacctgaaagttaagagtgatatgaaacacttttctgatatcataaaggtgcctatagcatttctgaccttaatgggtgttgaacaaaaggaggtttcatacttcataaagatggcattttaggacactaacctccattggtagataatttggcctttgttgattgcccacttgcaagcaaggcaaagttgtgtgcttaatgttaaatccatatgtctcctggaagtattgcaccaccgtcttcacagtaccatgattatcaatgggaaaactatacaggacaaaccaagcaagtgaaatcagcaaattatccaatcagacacacatctgcaaccacatgatagagaggcttcagatatgagcaaagcagactacgtacgacaactctcgtgttgcttgcgaggtaaggccagaaatgcgatacttcctgcgcatattgcctctatgtgtgacctcaacctttacaccccttagggccttcttgatctgaccaatgggacagtaaggaagcatgtaaagcaaacacagagaacacaaatatacaaataaagtagtcaataggataacctaaccttcacacgatcagcatcagataatggtctaactgagatgtctctgttcaaaagctgtgcaacaaagtcaatcacaggtagaggctcaatgaatgctgtcgatgacatatctgcaggacaaaatatcaggttaccccccagatgcaagagaaaagagacgtggtttgatgatctttaccaatatatgacaatgtacacacattctagatgattatcaaccataaccagtgacagataaatattgaatacaacatctaagattcaaggtttcccaatacaagtgattcctaatattggctgctattgtaccataacattagattatgataatttgctttgcaaccaacaagctcaattaatcgaaatttgtaatttatgtagataacttccacagatgtgcatgtaatttatgcagcttagataaactttcttactatcagcctacaacagaaagtggtgtaagtaggaaaaatactaggaaatgaaatattaaaaaagaattagcagttaagagttccatgtatcatagaaatctcctaagttattgtttccaaaacacaaatgatatttatcaatagtcagtcaaatagatcattcaatgagaacacagacctacaggttagtctaaagggggcaaaaaaaagtagctattctaaattataaggaattattatttttcttcgagtagtaacatggaacatgaaaacgaggacttggaatctgaccaatattcagagaaagtcccatctgcgtgggtcgtatgctttggtaaaaaccacgccaactttccaggccctcgccaagttgttggcgccttcctaagttaggcgaataaaatgaccttgcaactggagagtacctacatataaaaaatatagaaatgttcaaaagcttgctaacatgataatgatatagcaacaaatggcagggtaaatttaccttgcagtaggcaattcacgtagaacaatgtcaagaacttgaagagcttcttgaggagcatccgcttgccttccagctaaaaacatggctaaatggtggagatcagcgcgtgcagcaaatttgatcacgaccttaaatggtctctcacgcctgaagacaagcagatgaatcattggaagatgaatttatcaaattgttgaatgttgatatgtccagagagtacctctgtgcaccttgcccaacagcaaggctctcttcctcatcctgcagaataacgtcaaaggtcctagaagtaaatggtaatggaccagctgtgtataagctcttccttccatcatagactggaagacggccacccaaatgagactgcctatattgtgttacaatttctccaatgacagcacgattgacaccacgtgaaggaacctcaggagttatagacacctgaaagcatgttaaatgaaagctcatgaaaaacaacaaaagttacaaagcttcatatgtataagtataacaaggcaacacataaacaagatcttacatcatactggtgaaggtctttgtcaggcaattcagcaaagaaatggttggctttcacgatgcacctatcaccaaatgtacccttgccagggcgcattggaaatctcactgatttgctcgatggtggtgctggttgaatggcctggctagtggggctttgaccctggatggcaagttcctgaaactgatgttggacttcttcgctgctggcctcaacaggcagcgaagatgggccagttcttgatggtgatggtgcaaccaccgtagcttggtactggtcttgtgaggcttggtgcagctcgggaactgttcttgatggactggcaggaactccatgtccaccactgccactcctgtgttgtggcattcctccttgccgttggacaccacggccatagtactcatgtgcttgatattcaaccggaccaccacctggttgatgtgatgttggccctccacgaccctggtaacgtccaccacgtccctggtgttgtccaccaccacgaccagcttgttgagcatattgaggattggcaggttgccaaccaccacctccatgctgttgagctctctcaggtcgctgtgaaggaccccgtccaggagctccagtggcttgttgagttccagaactttccccagcattacggggttcagtttttttctttctcatcatggctaaagctgcaatgcaaggtgcagttatagctttagtattattattatcataggctaatacaaatctaaagagtgatggaggcccaaggcacaaaatcaagtgcaaaacagataagaaagtagaatgaccaggcaaatactataataaatagaaagagggaaatccatcattgccatacaatcgaagatactacatctgccacattgaatgacctgaattacaacatggtttataatctttcaggcaacggcggtacagcacataatattacatagtctttgccaccatattaatgatactatctttgttatgtccccaaatacccccaaaaattcaaagtatctttacaaagtgcagctgctcccagattcatgcattaaaagaaaaagaggagttacaagcaacaagataaacttttttctttttccacatgagatgcagtgatcgacagtagtcaatactcaggtcagcatgctaaaaagtcagagaaagtgagcgagaatcattgtgaatactgaataggacgaaattcgacaaggtaattaaacaagtcacatcatcctaattcccttgacaatgttagaaagccacacaaatatgacatgcatgatcaagtgggagtaattttgctaaagaagaaaagtaaataatagggaaatgggagagatgggaacttggaaatcccttgacaatgttagaaagccacaaacaaatatgacatgcgtgatcaagtgggagtaattttgggaaatgggagagatgggaacttggaaatgaaatggaagtttgatgagcaatgtagtggaagtaattttgctgaggaagaaaagtaaataatagggaaatgcaaaagaaaagaaaaataaatgggtgcagcatcatcttgcatcttaagtactcattaggttttccactttcagaccacgccagcatcatcttgcctgtaagtactatgtttatacaaagtattaggttttccactttcagaccacgccagcatcatcttgcatgtaagtactatgtttatacaaagtattaggttttccattttcagaccacgccagcatcatcttgtatcttgcatctttaacttaagtactatgtttatatatatcggatggattgcatatatggttgcttatccagcatcatctttctttgcatcctaaatactatgtttaacgaagtatatatcggatggattgcatatatggttgcttatccagcatcatctttgcatcctaaatactatgtttaacgaaggattaggtatatatcagaaggattgcattgattaggttcttttccaaataaatactatgtttaacgaaggattaggtatatatcggaaggattgcattgattaggttcttttccaaataaatactacagatcgtgtataacaatctgcattgtaaacatcgaggtaaatcaggtagcaatagcatagaacaacatcgcatcaaccaacaaacaaaggaaatcaggtagcaatagcatataacaacatcgcatcaaccaacaaacaaattacaggatattgcagatcaaccccaacactaacacgtctcactcacgcggggcacctacctcggggcacctaccttacaaatcgagacggatggcccgacagggattgctgggtaggggaacgattagagcgctggaaccggtgactctcccccttcgtcggcgccggcgccggcgcaagagccggtgcggacgagcgcgggcacgacgcggcgcgccgggccgatggaggaagacgggcggcggcggcgggcgagcgcctagcggtagcggagccgaggaaggaggcggcggctgcggaggggggtcgagggctcggtgcgggtgcgggtgcgcgtgcgcggcgaaggggactaggggtaggggaggcgaggggcgagcgaaccggggtgaggacgagggtgacgggagagcggttttgggcgaggtcggtcgtgcactcgtgggctgcgtgtggagacacttttatcctttctgctttattttcgtgtcaatcttctccctgttttcctccgtattttaaggagtctgaaaaaccgaatggtaattgataaggagaaacatccgttttataatcttaattgctttcctaaatagatttctaagagcaccagcacattagcgataatctatacccaaaatttgatttttttagtttcctaaactaaatagggagtgaaaaagctcaaagatagcctaaatttaatcccaaaattaaaagtggatcttttgttaaactaccaatagaaatttctgtttttttcattccacacccagcatgctcccaacataaattttcagcgctcgcacacgtaccagagattgagagtcgctctctcaccctcaaaatccatggggaaggagagagaaacacaccaactagagatggggagttgctctcttacctttaaatccacatagcaagatatatggggatagaaaatccaaaactactgcagtgctttttggatctgttggatcggattttttcactgaaatctctcgaaatcaattttgggaataaaataggatgattgttggtgatattaatcccttgaatttgttcgcttctacaccctcgtatttcaaaataaatacatctatcgaaaaggttattctagttaaactcttctagtacttcttgtatgaaagttagacccaacaatggatcggagggtatgtataatagatactaccaaaattttatatttttgttaagacttatcaaattttgatttggtattaagagcgaaacgtccttgaatttttaaacactttaatagcggaagttgagtgttttaactatatctagtctattatcttaaaaaaaggtaaaattgaaaacttcaaggaccaaaacgtgcataggtacttggtataacattgagccacgatgctagtaaagcacgattttagactgttattttcgctattttattagactgtttgttccacgcgtttaaacatatgttttcccaaaaatattttcttcctttccattatttagataactcgttaataaactgtttgctaagcctatttaaaaagtaataatttatctttataataagtagagaatccgctctcaaacttgacctaaacgttgctgtggaagccgacagtgtagcctatcaagtctataaggacaacaagtccatggtcaagagctttcggaggataaaaccagtcactccagcatcgtatagaagcgaatgcgacgtatacaagtttgaagtacaaacatgaaaatctcaagaccacaactgccatgtactgttgtactaacacgtactacttcaagtcatccagtacgtagtggtacttttttatggatggtttttactcctggttaaactttttttgaggcctcgtagaagatatacttttcttgagatgtgcaagtcaatctgcacatgttagactagtctatctgtttatgcaaccggtttgatctatgcacaaggaagaacaagcaatcgccaggtttactggtaaaccgtccatacatatagacagctgcttctagtagatttggttgtgttataataatcgttgttaaaggaaatgcgtactaggagcagtacacatataatgtagggaaaaataaaaggaaaatggagtacacatcgaaagatgccaagtggggagtgggccggcccgctgacgcctccctacatgtcagcagctagccagtgggccagaggcggcttcggcccactgatggaaaaaaaaaacctggaccgctaaagcctcgaaacgtgtcaggtggggtccacctgcaaggcccccaccgcacgcacctggtgcggcacccacgacctggcccgcggggcccttcctcggtcagtgtggcttccgttaaacaagatcgcgcgggccccaccaacctccgtggctatttcggtttcacgtggattagaaacaagctttgtcttcccattggttattccactattattgtccttggcttatctgccaaatcgcgagtcaaatttcctgctcacctgtcgtatttggtacatttcatttttcctaatccttctcatcgaagttgcaagcatattgttcatctgtcaaattcgttctcctgttcattgatttgattggctaatgttctggcagtgcgaaggtttgctggactcaccgagagaacgccagaacggcagcatgtcgacactcccggtccagattaacccagctccgccgatcgaacattcgacggcagaagagcctgtgctagcaatcattatccctaacctgatcgatcagccgatcctctcaatccgtctcccggcccaggccgcccccctaatttggccgtatcccggtgcacgtcaaatcaagatcaagaacgacaaaagggggagctgcatccaccagcgacaggggaacaggttggaaaacaactgctttgttacaacatgcacgggagactatttagtaactgtagcactaacaccaaccgcaacagtctaatgggcatctcacgtacgtacagttcgatcgacaggcaaaaactgtgttcacagaagcaaagaagggaagaagaatcaaataggaagaagaagaactgaagaagcgaggatcgaggaagaaacagcgatcgcgatcggagaggcaactaaaagcgggaatgcgtgcgtaccttgatgggagtagtacccgttgtccaactggaaggccatgtgcaagaagcttcgacaccgcggtcaaagccgcagcgcaaaggagctagcccctgatcacttcgtcgatcgccaatggcggatcgattgagatatatatgatatatcccgcagacagagtggaaactttctccttttgcttcctagggacggacgacgaatcaggaggaggagaacaaagaaataattggaggaggtggaggcgagagagagaggggtgcgtccttatagataaagaaccggtgtttgatttggcggtgggtgtggtggccgctcgcgcgcgagaaagcgacaccgggggaatcggcgatggtgtatgtgtagtattggcggacgacgcagcagcaacgcacggtcgctacctgcaaaccagattgctatctaatctagctattatctcgctgctggtgaagtggtggcaatggacttaatggtgaggcaccacacgcactgttcggaaacagggaggccattggcacccatttgcagctgtgccttagctagctagcttgccctgcagattatattgtggctaatgaagtagcttgatttggccatgctttctgctcctgctagcaagatcaaactggcgatgattaatgttattagccgggagttgtctagctaggacagtgcgttgccttcggggttaattaggaggtgacaatgacatgtggggccctggacgggaggaaggccaattccagtacagtagcccggtactccatgtcactatttatcagggtcgttgtgagtggtttcgagcctcgaatatgtgatatagtacgcaggaaagagacggatcactggattgacgctttatgtggctctgccgcttcgcgccaccaattggttgttttcagaggcaagtggccagtttggtttggtgcttatccttttgcaactaaacaattacggagaccttaattccatggcctatctatacgactatactgtatctgctttacatattcaggggtttgtttaacgcatagagcgcctagctagtcacacgccacaatggccgtgcacaaaagcatcggttaatttccggcaatcgcatgcaaaggcaaaggaggttagggggaggaaagcgagcattaagccattaattcccctgtgattgttgtgccctgtttcgtgatcaagttgcaatgagacgggaatatgccgtgcactcgtgcaaccctcggcttttgcacctactcgagaacaattaagaaaaggcaagtgtctgtctggaggcactagtagatagcgtactcgttgcgtgcgcaggtgtaaagcgcaacggagaccaatctgggtgtgcgagcgagcggcagcgactgcgaggcagcatcaggatcgcagagttacaagttgcaaagttgcaaggcctttccgagctccggcggcttctctcggttcgcctgcgagtgcgaggcagctcatgcacgcgttgtgttccccctgtctcgagagggtgttgtactgggcctctagtgggcttctttaggctacaattcatttcgtcggcgaatttcctataggaataagtccactttgactcccttaaaagtggctcgaatctaatccatgaccctaaaccgcaaaaccggatatctcgactccgaactattgaaaccggtgcaatttgactcccttggtggtttggagggcggtttcgctgacgtggcgctgacgtggcaatgttgacttagtatgtgggttgacatggcgcttaggtggcatttgaattaaaaacgcatacgtgggacccgtttgtcattcacacatattaaaaattgtggggcccactgatcttcctcccttccctctttctttctctttctcttctcgccccttcggccggccgcgggggtcacatgacaggttgtagcggcggcgggcgggggcagagcggcggcggcgagctcaccttccacgacgaccgcgtcgacctgcctcgccacgacggcgggcgggggcagagcggcggcggcgagctcaccttccacgacgaccgcgtcgacctgccgcgcgctggtcaccgcccaacgccccggcgctgtccatggcgcgtaccgcgcaggccaacggcgtgtggttgtggagctcaggggagagtccttcacctacactcgccgcatttcatgccctaggaggctgccgtctcggccccccatggccggaaccctccacgaccccaactccgggtcaggaggcgaaaaatggcgcccactcctactactactcccatggtcgcgccgttcgcccagtatgtagccgactcctcctccacattgcaatccgccgccgccgctctggcccccacccaccgccgttgtagcctattcccccgcggccggccgtaaggggagagaagagaaagagaaagaaagaggggaggaagaagaaagagagaggggatgacatgtggggcccacatgtcagtgggccctacaattttcaatatgtgtgaatgacaaacgggtcccacgtatacgtttttaattcaaatgccacttaagtgccacgtcaacccacatactaggtcaacattgccacgtcagcgccacgtcagcgaaaccaccctccaaaaccaccaagggagtcaaattgcaccggtttcaatagttcaggtgtcgagatattcggttttacggtttagggtcatgaattaaattcgggtcacttttaagggagtcaaagtggacttattcctttgctatatatatgccgttttgttttttttccttaaaaatcatacgttttattttgacatatgattttcactggatttcaattttttaccgatcaagctgtcaagttagacctaatttcatcctttactcatttactccctctgtttcataaaaaatcaacgtagtacacatctagtattaggttggttttttatggaacgaaatgagtacattgatatagtccagctacacgcatgtatgggttggtttgattattcaaaaaagtaacgattgaatgaaattacattacaatttaaatgtagttataatgtaattaaattatctttatatttgtaattgcatttgtgtgattttgagtgatatataactagtctctttcgttagagccgacatgcctaggtgtgtattcggttagactgataaattcagtctaggtattcgttctttagtagatttctgtcaatggaaattaaagcatgatcagctctgaacaatagaattaaagaccgagcaattcagtcttggtcatgaccagattggacaatagaccctatgagtgagaattgaggagcataggcattttgcaaaaatctagctataaacaaacatcagatcagctgggtgggtgcaggattcacaattccgatgaaaaccaatcgaatttcgcgaaatttcgaggtttcgacgaggctttttcctatttttctagtcaccaattgaaatttcggttatttcgctcggaatttcaccaaagccgactggttttcgcgagctaatcagtaaactcagagaatttgtattcaaattttggtttataaaatttattcggaatctaccgacttttcaccggattttgcgaaaaatcgtcattctgtgagagcccgaaacggaaggttatctcggaatcgtaaaccccatgtgggtggggccgtgaggagaggaatacagagagagttggctgtattctttaacttgaggttcccaacctcaccccctcgtttactatatatattgttgggctggtggtgggtctactatcaaatttctatttgttaaagtatttcagttaaccatgaaagtggccgaatggaccgaataaaaattgcttagatccagtgattgaattaggttttatttgaaatacaaaatgggtctaaagtttgtaagttaaattataaggggtttaaaatgttataatttctttgaaatataaacaaaatgatcaatccaaatattaaaaattattcacggtcacagacccacgattatttgaagttaagtaacaagttctaaaaaatttttagatctgaaaaagtatgccaaacaggataaagtcagcggcggagctagcgtgggggcgggggctcgagccccgctaccccgctggactccatggaaatatgagggaggaggggggggggaagagggagaggaagaagaaaatgggggagagagggggctggaggaggaagaagaaggttgagcccccctctcctccaaacctagctccgcctctggataaagtgaccaaatttctcggtccgagtcttttccgtttacgagttatgttccagtatgttttgcacagtacacgcctaccgatcgacgtgagctgtgtgcccgtgtctccggtcccttgtgctgttcgttcgaccgaacgacgtacgcgagctagctactagtatgccgttgtgccccgccggcacgccgccctctcgtgcactgcgaaaagcatctactacggagtacatggtacgcaggccacacacgcatgggccgtgatgcgcgcaggcagaagcgcgcgcgcggttgctaaatttcatgtacgtactccccggtggtccagtgggaattctggtcgatcgcgattgggtcgcgcctggacgcgcgacggctcgtgtcgtactgatcatagcgtatgtcaattgtccagattcatatcatagtttaaaattgctatattttgagatgaaggtagtacgtcatagcgcttgcgggcggcgtgccggtgcctagaacggaagaaaccaacaacgggcaacgtgcaacgagcggtagtgcgagaatcgcgtctgtgtctctcaggttttccgagtaacgacgcgattctcgcatgctagccacagggccacatcacaccatgatcgaccatgtacgtttcgatcgagcagtcaaagccggatcgtcggaggctcggagctagctagccatgtcacctactacctagctagctctcgatgcctatatgtacgtttcctccacgcagcaaggggtgaggtcccggccgttctgaatgtgcctgatatattcttccatctgcgccgtaactgcttactgcaatgccatcaaacagctctggccacgtaggctcacatgtactcgtgcaggtatgcataaacacacactggtaagcacgtacttgtacaagctagctagtagcctgggacgaatctaacatgaagacggtgatgactctaagcctccactattaacgcgagggccataggagtcgccacgaaacccctactaaacttttttacagaaaagctaggagagttgcagttttatctagtctgcttagtcctcctctcttcccttatacgtcactgggagtaactaactacgttagctccaccgtagctagctagctagcgcaatgtacagcggcaattatatacactgtgcatcccatcgatcgatcggtcgacaaaacgtgcagcgcgtttcctgtcgtccgtccgcccgcgcgcgctttctgagctgagccgagcagcagcagctagctagccatcgatcccattgaattcccgctaatgatggccgcgccatgcatctcgcgtctcgtctcgtgatgcggggcgtggttgcgccgcgcgcgcgcggatccgtcagatcgatcgctattgccgatgcccgccgcctggcacgctgtcgcgaaccctagacggctaccgcacacgtactccgtacgtagtacgcccaacgatcgatatatagcagccatgagcgcatagccatcagccaaagcccacaaggcaaacaccacacgcgcgacgtcagagagagctatagcgcttgcgcgcgcgacggcggcggcgacaagcgaaacggcgtggagagtgggagattgatcgatcgagcgagtggtaaaatgggaattagcggcgagaggaagggagccgcgaggcagtacaacaggtccaaggtgccgaggctgagatggaccgcggagctccaccgcagcttcgtgcgagccatcgactgccttggcggccaacaaagtaatgcctcgatcgatcgtcgatcagatcagtcacttcaattaattcctttctcctgctttcttgctgatctctgcttcgatctctctctggaacgggtgttgtttatccatttgtttgttcaccctcacttacgcgtgcgtacattcatgcgatctctgtcttccaatggcctcatgttctcaatggcgttgtttaactgcagaagcaactcctaagctcattcttcagctcatggatgtcagagggcttaccatatctcacgttaaaagtcacctacaggtcagcttcaattctcccgttcttcaggcgttattttgctatactagtcatcgaccatggaattataagaaagtacaccagaatttactgtttgtttaatttcgacagatgtacagaggcacacggcatggcattggacaaaacggtgaggctttgttaacttagttcttctctttcttgggaattgggattggattatgctttacaggagctgattatagtgtaataattcgacaatgttatacgtgcctaattattgtatactaattacattactctatctgaaacaagagatctaaacttcctgaaacttcccagttctggttggtgtaaattaggacctcactttgtggttgtggacttgtgggggctgtaattcttcagcacacatgtgaattgctaatggaaagctaaaccgactttattcttattcttttctcatgttaccatcagatatgcagccacagctacatctgaagcagcactcattcggcagtgatgagcagagccccaaggaattcatgtgcccacccataaaaaggttttgctgccgctagctttttctagctagctcccaatagtgctaagttaaaaagattatctttagtggcctaatctctttaaggcacaagcaccttttccatactcattctctcgctcttctctttggatgaacagggccaaggtagggacagaagcttcaggcaaatacagatgcatggaagggagcagtgacatgaggagtagtgctcctcctgcaggcacccggtacttcatcgatgattgtatgcgactgcaagaagtgtccatggataggaggagatcagatcaacacgatgctgcagctgccgctcgtgctcgtgctcctgctgctgctgcttcaagccttcatcaggcactgggattttgggtgcagggaagaagagaggagccctttatggtacaccaggtaaaaagaaaagctaaaagaaaccttagctagggcaagaacaaaaggcttatcaaaagaagatacatctagctctcttgtcttaactgctttgccgccactgatctttctcttcacatgtctctcactatctctagtcttttcttcctagctttatgcatattgctgcatggttggcgtaatatttttttcgtataattctcccagatgctagctagatttgctgatacctacctcctttccctcatcgtgcatactataacatgttcacttatatggaactggactagagtgtccaaagatatactaggacactttacctattaggacttgggagtcatatctctgattggcatcgatatgggcatgttcatgcacatcccagcaaaggtcaacaaactccagacgtgtccttcaaaaaagagagagagaagaaaagaacaggattaatagaatttatacatagtatagaaatactaggacagtgtggtacatacactgtcacagttgtactaggcaccagtatatataggacactgccacaaatggcccttgagagccctgttttctgataggaacacgacggtggtgtaactttgcctcagagcattcccttcagctcatcgacaatgataagccaaaagaagtggctttttgcagaactcggttgctatccttgcagttgcacgcagcagtttcatgatggacgatgatggcgcggtgcggacggaaagaacaagatcatgaaagctctctggtgcccctgctccggctgcaaattagtagcaaaagttgactagtgtcaaatattttgctttggaagcacattagctcgatctgtagctccttctgtgtgttacagtttcactgcactcgtatatatgggctatcaacctgcatatcagggaaataaatttgacagttgcagcaggacaaaacaaagcctgtcttgcttgaaatgcagttaaacatttagaacagtttgatatatcttcctaacctttgctgtgtcgttggattttgcagattagtaaacccaaagcacatcaactgaaccatatggtcaggaacatgaagatatcttgcaaggagaaccacgaaagtagattcttcatggtgagaagtgcaactagagatgaacaagtcaagaaacgcgcaccgccgctgtcgctagccgtcgaccagaaagctgcgaacgctatctcctcctggcccagcgaggccagctgcgttatctcgccgtcgccgaggaacttcagtactgactgctctgggcctccagggtgcagctttgttggccggagagttaacctggaactttccctgtcaatatgtggatcataatttagatcattaatattaataattatggtagtttttgttgatcagtccctcgtcatggtgctattactaatttctgctgatctcgtttctcgtgaaacaccctcgaagctgtgattgctgatcgtatggatcaaggtatcagagcaagttcaaacttataagctagctactcgacacacgatttacagacgagtatattacttcctccgtttcacaatataattcattctagcatttcccatattcatattgatgttaataaatttagataaatatatatgtctagattcattaacatcaatatgaatgtgagaaatgctagaatgatttacactgtgaaacggagggagtacacaatagcaggctacacggttcctaaacatgaactcgctccgtcccattttaagagcggacttgagttttcgtgtccaactttaattgtccatcttatttaaattttttttatgattagtaattttattgttattagattgtaaaatatgaatagtactttatgcgtgacttatgtttgacaaatttttttttatgattagtaattttattgttattagattgtaaaatatgaatagtactttatgcgtgacttatgtttgactttggcaaggcctctggtagaagtggctagaatttcaaacgcaaaacagtagcatttcagacatgtacccttttttcccctcatttgagctttgtgtgctagtttggccgcgtttagttcctcctccaattttttcttgacgtatacggacgcacatttgaagtattaaacatagactaacaacaaaacaaattacagattctgcctgtaaactacgagacgaatttatcaagcctaattaatccatcattagcaaatgtttactgtagcaccatattttcaaatcattgcgtaattaggcacaaaagattcgtctcgcaatttacatgcaagttgtgtaattgtttttttttcatccacatttaatgctccatgcatgtgtccagacatttgttgtgacagaatttttagaagtttgaagggaactaaacacaacctttgtccattatctttttcaaaaaaaaaaaattcccttttttcaattcacctccttaaccctagttagacacatcaaggaatgcaaactttgggccctcatgaattcaaatttttcacaagatctttgcaacataccacaaatacagtttaattcatacatgaactatgaaaggtctgcacattttaactagatatagtggaaatgaaatgagggcggcctataagaaaaatcacccattaccagtttgccaccgactttgacagctcctgcatctgcaggaatgtgctgaacaaagaagattcctcctgtcctgaaattgttattccttgtctaaaggcattcagcatatataaaagaatcaggtgataattttgaggttcgcaagtgtatatataaatggaatttcagagtagcatactagcatcagtagtgatagctcacatgttgcacagtatattatgtgtcaggagatcaaacagtagtagcttaaattcaggcttgtatttataagcaatatgtactcatgggtatactgtagtagagctaccatgtgcttttctttcttctccctcgctctgctggaaggaacacaaacagaatgattaaaacatagtcagctcatgtgcgtgcgtgtgttgtctgtttcgagttgttgtttctcaaaagcctaagagaagcaaacatgtcacgtagaccactgatttgctggttaaaagattgacaaatacaacactattctggtcgccaaaagtaaagaaaacatctaaaaaggtggttaggaatatatactcgtcagtttctgtgcttacctttgatactgcgaatggcatcatcttttgtcaaaatcaaaccatttaccacttacccaaaagtttcagactgacagcatctcatctcaagtacacattattaccatgatgagcaccacagtagattgcagggaaaaagtacggtggacgaaacaaaagccatctcagtagctgcttcttcagcaacatgcatgcttttgtctgaactggccataatagataaagttcagaaaacagtagaacaccataatagccagcgacctcatggttttgacatcgcaacatgcaaaaataacgacaagaagtaccctccaagagctgcatgaacgaactctgcagggctgcaacttatacactgacctacccaaaaccagccaaacagcagttggtggggactacagatgatatgatgcgtagaacagcacgcaaccatggaagggtttgatgtttgttaaaccatctcgaccatagaagattcaagctgccgcagagttgtaaacttgaaatgagcagactgatcaaattgtatcatctgtattatgcccatcacggtgccatctgattgatatcaaccaaggaggcatcacttcttctttgccgcttttgcatcaggcaccaaagccttgacacagagacgaggcttagtcgagatgagttcagacgggagaacggacaccccagccactgaagatcccagggataccccagaaatagggagcatctccactagtactgccacctggacattagaatatatcatttattgtgcaaaacagtatgcaagatttatgcacaacagtgcaaagcaatttccaaaaggccatagatctaaaacttaagtttttctctgtatttaaagtaaaagaacagagaatataattgcgtattcaaacatgatagtgcagaagttatctaaaagtgtaagttgtcctctacgcttcaaagtaaaagagcagataagtatacatagaattcaactttacatagttattatgactctggataaatggttccaactttttatctcactagtaaattagtttgtttcattttactctcatcactcctcgtttatattattgaaaagtgaattataacatttggaacccatggtagaagccaaaaaacacgtaaagttgtgaactatcagaaaacctagttggccgttgggtttcaaagttcaaacaaaaagacgtggtgaaagtagaggtatacttagcggaccaaaaagattattattgaacaatcttgatgatgacaactttgatgaaaaatattgacttactgacatctgctgcatccaaaagtaaacgtgctgaaattgcaggatgtcagataatcacgtgtcaatactgtccaaagactcaaaaacttatctcagttgtcatcatgatcgagtggaaaataacacgctaacttcactagtcagcattgataactttgttgtttttccaatttggtgtctttagattatggttctttaaatcctccatgttagctggcaagtaactctgctaaagtattgagaggttcattcaaggaaccgattttacctcaggagatctgagatccacaattgagttctcagcaactgatttgacggcaccagcaacgaccttgaagcattggtccctgtccattaaagtttgttgttttgaaccttcattgccattcttctgccctttcatctctgtttcatcaatgcctcttctattatacccaactgcgaactttaccataggttaacattatatgaaatattaacagttgatatgtttccacgagataatgctgccaatgctaaagcccatgccattttcaagatagatacaattataaaccgttcaaagcatgaagctatttcaatgggtaatgattaggataacagaaatgcgtaattttgttacttgtgcatagcattacagtaccattttagagaactaaaccaaatacaagaaatatttttaactcaacacatgcaatggcaagagaactggatatgagatctgcaatggcaaatatatatcacaaaagaactggacaagagaaatccagctatagaactggattgattggattccatcaacggtttaatccaatcagtaaatgtaagcagtgcaatatgctgtgtaccttgataggctcatcttggtcttccttactctttacaaagtcaagaaataactttgacacagtagtatgtagttctgcttctgacagaacacatgtttcctgaataggaaatatgcgatgacaccatctgcccattgaaggttgaatagtttcaaatcagaaattttccagtgcaactagagtcaatcatggcatacggaattggttggcagaaagacgcactgctgccatatttcttgaacaaatgaatggtaataggttgcataaatcaaatcgctatgatgcaaatctagaatagaaaaggacaaaatgataataatattatcttcttctgctttcttagtgatctggtctacactgcacatcattcacacattcagcatattagcagaaagaagcaagcaagcgtaacatattgcgcagtcactaaacggtaccgaaattaacaagttttgaagttgaaaactgaatcaaggttgacaaacttaactatactcttttaaaagggagtagtggtggtggtgagtggtgaatctgctagtaaaagaaattatgctagacaaagcgtgctctagaaatagtatgttgtaatatgtgggatcgcttattacttttcggcacttccatatgacagctgaagcctgtagttaataaatcaactttgttaacagcattttgagagaatgagtgtctaatgaagttaagaacttactgtggagatttaagcttgccagaatgcagtgaatgaaacatttgtgtaagcatttgaacaacacgaaggcctccgctaggaaacgaaaagaaaagcaagccacttcttgacagtttaaccagtgagagatttgaagtgtcgtcaacatttttacttgttttggagtgaggtgaaactgagtctttttctacactgcctgttacagaaccagaaaagacacagcgttagaaaaaagacaggtaaccaaaccatccaaaatcacaccctttagattgaatgaatgaatgtggctaataagttatgaaatacaattgatgctaaccagttgtttctgaagcatcacccttctcatatgttactgcatctcctgaattttcaatatctggtgtctcggaacatattttccttttctttgctgaaacttccgtatcacttggttctgacttttcagaactatagctgtttgcatgaccaatggactggcgaaaaacagtagcacacccagtatatttcagaatagagtgtaaggaagatgaagtggaaaatggttgcccaaagtatgaataaactaccacaatcaaaggtaaatactacaacttaaagttgctctatacttgcaagatattcagatggtagcaaatgtgctgtaacattaagttttatgtgctagaattatccattgcagaagaacaaccaaagaataaggagcaagacctacattttcaagaatggaaatggcttcctttgttgcgcttttctcacgttctgtaagaagatgatgatcacatcaaatttttgcagtagtgaatagaaattaagtgtatatgtagaatttagctatatttaagatttgttttaataaatatctttgtaagatctgtcacagggtagcagctggattctaaaataacccaatagtaggaataagatcaaaacagggataaaatgtaggataacccagatcactcaagaccagcagaactttccagaataaccgcaacctaagtggtttggctgatgcttcagcacattacatacctaagaacactcctggctacacaagcggttacagattttattcaatccttgactcagtgagcatgttacaatttccagaatgcacatacagcagaccaaacatcattacttatttttttaagacaatacacctttggtctctcaactctttccatggtttaagttttcacccccaactccaaatcgtttgaaatatgtcgataaacttttgaaagcatgcagatatcccttgcaaaaaaaaaagcatcagttttgccatatgtctagttagtgtgtatttggcctacttgtcagccccctctcagcttcatcttctagctggactacatgaggactgaggacactggcaagtatagcgaagttttttcttctcaccatatttttttccttttctcctatactgcattatgacaaataaaagtacaatagttgcaggtgatccaccacaaatttataaactatgccaacattaaacagttgtaaatttgatttacttttcagcacatacaactacagttcatcaactactaactgacaagtcaacagaagaagtgtctggcagggtcgagtatacaaccattgggtaagctaaccgatatccatacaacaatgtactaaaaactcatacaccaaagtcgaagggtaacaaaaaggtagttagttctgcgcctccaatatccacatctaatgatctaaatgctactagtaccttttagcgtcacaggggtcactcgaatgaatccactaacaaatccaccacctgaagtatctagtcttcccctacgtatccatatccaacaaaatagtttttgctaaaatagcacgagtaagtctaaacatggatgaggggcacgcactgatggggcaggtgatgaggaagccggagtgggagcggaggaggagggagcccgacgcgcggtagtcgtagcgcgggaggtttatcaccgccgcgtgctgctcccatggctgcagcggtcggtcgctggctgcggcggcgggggcgggggcggcggctggtggctcagttggaggctcgcgggccggcggtggggtttcgatttcgggcttcggctccggttcctccgccgccgccgccatggagaagcgccgaggatttctctctctctcttcggtcgcactttgggcggcgccgaggtccgaggagggtttggggtttgcagacgtattctgttaacctgttaactcgatccgaaggcgtatttctgttggttcccgtgaactcgaacagaaagcgtattctcttcctttgcgtaaactctcctcacgcgcattgcttataggatcaaaataatcgattagagttacacatggaaaagtctaggaccggaatctgatatagtcacggagcttttcttactaagttgatttcagcagctgccaagtactccatatgtctaaattcattaatacctatatgtatgtgggaatactagaaagtcttacattgtgaaacggataagtacctgagatgatgctagtagatttgcgatggccggtctattcatcttgtttatgaaaagatacatctgggtccaggtatgaaaaaacgtacgcataattggaagactatagacaccaaccttacaatcatgattattgaattattggtatatccatgtcctgtcctgaaagaggctatttttgaacaatttccgtgtttgtgcagatacgatatgcacactgttgtgtgtttagggtgctacttacctttatttcagtgaagcatacacaacaaccacacgatccgactcatgtttttgaaaccttacaaatatataaagagattgatgttgtttatcgttgggtcgatgaagatgccgactgatgtatattaaggagaagggagaaaactttacgaacataccctctctagagggagcgcaaatacagtgcgtcggtacatcgcctttacaacattaagaaattacaataggttgaaatctctctgaaactggtgttgtggcaatactcaacaaactaaagagcctttgattttcaagtttcccactcatcacacatgattgcacacaactaagggaccgacgaggttgttccatcgaatacccacatgttgcgctctttctagatctaccaagttacgaggatgactccggcgtcgaacgtcccacggtcgaccttggaaacggagtgctaggcagtaagccaccaactgggaaagtccgaagacgatggagaacaggagagactcaaacgagtccgaatctgtacccaaacctgttgcgagaagggttgagaaggggcaaccctggaagatgtgttagtatgactggccatcattggagcataggtgacaaattggcgcgagcttccaacctcgccgctacaggttgtcagttgttaaacaagcattgcggacggcaagaaacatgaataacttgtatctcgccggcgcgcgggatttccaaatgatcttgccgagagggcttgtttaacatatcgctaaaatttagcgttaacaggtttcacaaggtgcaaacatatagtgaaatcaaacttcacgaataacaacacaaatatgaaaaatatatgaactatgaatccggcattggccatggacgattaagctcgagattaagatcactttcctatagatactaggaataaaaacttttcctgagatcacattgagtagtaattcaacctgataaacaaattgcactcagcttcgtgggagaggcaggaactccacattgagtagtagttcaacctggcaaataaattgcactcagcttcgtgggaaggatatgcatccgataccgagatctaacgattagttgaagaatcggcgtgtctgccaagattgaagtgcgtgatgtatatgaaccgacccatatcaagatctaacgattggtcggttagggatggagttaccgtcaccactatgttttattttttaaagtgtatatagtattagtataaatatgattctcaacgaaaagattagcatttttttgtccattaatttgcaggacaccaaatatgaacagttacaaactattaattgagatcagagttgctagctagatactacgaataaaaacttctccaggcgcacaccatgttgagtagtaattcagcctgaaattttactcagcgtaaataatccaatctggcggatagcttcggcgcgaatctctgaagcatcggcttacccgcgacagctgcgccggacaggactccgccgaggatgccggcgacgatcatcgaccttgggccggacgcgatgcggtagagcgccccggcgctggcccccgcggcgacggtgttgacccagtcgtcggcgccgtcgcgctggtcgcggacgaagctctcggtcccggcgaagagcatcgcgacgatgccgaaccggttgccgaaggcgcggccgacggagccgctctggttgagggcgcggttgatgcgcagcttggcggactccccgcgctcggcctcggcggcggcgcggcggaggcccacgagcgcgccggacgtggcgccggcgaggtagctgacgccggtgtagaacgtgaggttctcgccccaggtgcgggtctgccggaacttgtcctcctcgaagaggcactccggcgaggtgggcaggtcgtagagcgcgcggtacgaggtggggaaggcgaggccctcggggcgatccggcgagtagaagcggcgcccttccgtgggctcctgctgggcgtcaacggcgcgggacatggctggctgatctagggttgccgtgggctgctgctgccgctgcgtgccttctgggtttctggacgatcggttttggttgccgccgccgtgtgccgggggtttaagagaggggagtggtctccgatctgcagtctgcgccttcgccgtgtcgccgaagaaaagggggagggcggagccgtgcgagatgcggactcgaaacccagtaggaaaaggaaccacaacgcgacgccacggttccgacttccgattgagaaaagagggtgtgggccggtgaggtgggccgtgggtgtcggccttcaagtaagtggtctgccagcgcggcctccctccgcctcctctcggcctccacacaactgtgcacgcaaggggctaggcggaataagtccagtaggactccctcaaaatataagtccagtttatttgaattccttaatcgcaaagatatttgaaactggctccgtcgtggaataagagaacatagtatttgcaaacgaaaaacagtttgtgaataaaatttttatacacgtgtttttagcgatctaaaagtaaagactgaaaaataaacttcgatgaaaaaaaacccaaaaatcaactccaaattgagagttgaaaatttaaattttggctgataagcataagcaaaagaaaaagatgaggctgtggtgtaatttgacttcatagattattgtaagagtggttttcgctgaggtggcaggttaacttgtctgctttcggccagctattgggcccgccaccgcgtcccctttctcaaatgggctcgactttataacaggccgggccgtgcaagcgccacgtagctgcacaaacaaggccgtatcgcgtcgtgtcaagctcgatctagagttgcaagacccccaaacccccgtgacctctccgccgcagccgcaacagcaatggaggcgcaggcggacgccggcggcgacgacctcgccgccatgcgggagcagtgccggagcctggaggaggccatcggcttccgccgggagacgcagatgggcctcgtcgcatcgctccagcgcctcgtccccgacctcgtcccctccctcgaccgctcgctccgcatcatcgccgccttcaacgaccgccccttcgtccccaccccgaaccccgacggcggccacggtaagagccccgccgccctcaagccccaccaccgccgcgccctccctgacccggcgcgctccacccgccgcaagacctcgcccggatcctcccctgcctccgtcgccgctgcccccggcggcctcgacgccgtgcgcaccatggtcgccgtgtgcctcctggagctcgtccccttcgccgagatcgacgccgccgcgctcgcccgccgcctgcaggcggagagctcatccgccagcgaggccgagcggactgctctcgctgacctagccgccgaactcggcggctcggcggcctccgctgtagtcctcgccctccgccgcatagccgaggacaccggcggtgtgcagatcgaggaggccatgattgggggcaagtcgatgacgatggtctgggccatcgaccggaacaagctcctcaaggagctgccagaatccgctactttgccgctactccaacctcctccagccccccagatgcccccctctgagaccgatgccggcagcgcaatgataccaagaacaccgcagcagcagcagccgcagccggatatgtggccgcattcgatgcctccgatattcccacggccaaggggcatgacgatgcaggggatgcagagggtgcccggcgtgccaccagggttgatgccgctgcagcggccattcatgggaccagctggagttatcacaatgggtgggggtgtggggcctagccctaaccagcagaagcagaagagcgaggaggacgaacttaaggatcttgagttgctgctgaacaaaaagacatatagagagaagcagaacaccaagaccggggaggaacttttagatctcattcaccggcccacggcgaaggagacggctgtggcagcgaaggtctgttttcccttcacctatgctagtggttttgttgtttgcactgtgtagttagtgatgctttgggttgctgatttgttattgatgtagtctcacactgttagtcctgtagtagtaaatgagctggcagtggcggacctaggatttgaacccagggtaggcctagcaaaaaaaaaaatctgaatgcaatacaatatgattcgatataaaatgtggtaaacgatacggtatataactctaaatggttcaatacaagtagaaaataacaaataagtttgaatcttacctaaatggtccaaagttggcatggaccttttagaatgtaccctcttctagccgcatcttgatcgttggcatcaaaacttgaaatagaagcccttaagcctggatcatgttcaatatcatcaacatcataaagcagcggcggttcttcttcagtttcaattgacccctgttgagttatgtgtcttagtgaatatgtatatgtttagggactaaatgtaaagaccattgcatacaaggagatgggggacaccaggtccaaatcatccaaaatttacagcatggtatcagagcaggacgatcctgcttgattttcttgcaatccctagcaacacgagttaatgtggaatgctggtttgcagactgcagtgaatcatggtccagaggtagtcctgaagagatgaggttgatccatgtttttttttggtgattagttgcatctggtttgctgcctgctgtctgtaagagtacggtatgttttttgccaaggaaatccatccaagccttgccttgtgatttcgctcctggacttgcattttcttcgttgctgtctcagcctctcaggtggcgttgctgctgttttctttgccgtgtgtgctgtcgagagttgcagcagacctgtgtagttgtgtgaccttgtataagttcagtcttgataaatctatatagaagtttgtgttttgattgggttccaacctgctcactaagaaatgagtgagccaactacagcaggggcggctgggcgctggcggcgtcgggcaggacgccgggaccgcgggagccgggagctcgggaggccgctgggcaacggccggacgtgagacggagagggcgcggccagccggccaggggcagagtcgcggagatggcgcggccgcgggggcgccggcgcggcgcgcgaaggcagcggcgttgccgccacggatgggcgtgcgcctggcgtgagccgggaggccgccgaccgacggacgcggcgggaggagcggcggcgtgagtagcggcctcaccggacggtgggagcgccggagttgcgccggcctcgcggctcgagggagcgctgtcgccgttggtcggtcgggaggggagagtgcacaggagagaacagagaagagacttagggttttttttgtttgttgggccaggcttttttcatgggccaagaaaaaataaatacctgatcttctctaggccaaattctagggtagtcctgggcctacctggactaccctctgggcccgcccctgtgagctggtctacttatgcattgctgttgttaaaactatcataggacgcataacagctagttgtcggaggcacactgctataatgaacggtttatcataaattgcttagattctgcactgaattagtgcgactgtcaaagtaaaactgttaaatgttgtttgacccatctgcattgcctatatattgtcaacctctcgacacttataacttccactcttccagttcttacacatttaattgtaataatatggttgacatgaaaatcattcatcttgttttgttaatatggttttatgttcatgcagtttaaaacaaaaggtggttcccagctgaaggaatattgtaccaacttaactaaagaagattgccgacgccaaagtggatcttttgttgcctgtgataaggtctgtggtgatagtgtcctgcaccccttttcacaatgtgtacttccgcacgttacattttgtctacttttaacaacagtagagcaaaacctgttgtgtttgattcaatcacttaaaatgatgtgcctatccacaatcatggcctctttgacgatgaaattatcctgttaacatattaggccttatttctggttacttgaatttattccaatcaaaatcttcacatttttttccttgaatacttgaatagcttttgttatctggtcttttagctgttcatggtaacaactaatctggaagtaactgtttatatttcattctgagcaggtccatttccgccgtattattgctcctcatactgatacaaacctaggagattgttcttttctcgacacttgccgtcacacaaaggtgactatggcatatacacccttgtattttcctctattatgatgtgtgtttttgtatcttacatatatcctataatctgtagacctgcaagtatgtccactacgagcttgaccaaacaccagatatacctccaatgatggctggtgctcttgcacccccaaggcaaataaggctccagagagctgaatattgttcagaagtagagcttggagaagctcaatggataaactgtgacatccgaaacttcagaatggatatcttaggacagtttggagtaattatggccgatcccccttgggatattcatatggaattgccatatggcacaatggctgatgatgaaatgaggacccttaatgtccctgctttacaaactgatggattaattttcttatgggtcactggtcgtgcaatggaacttggtcgggagtggtaagtttccagaactatatttgattagttgtcttcagcagtaccaacaggttaattaataattgcgtagcattttagcattgttcatatcctaatgccccttactgagtgcagatcatttagatatcccacacttcatactcaaataactcgataggatatagatgctactgtaataacaagttatgtcatattcattcctttactgaattttgtttttacttaatgtctactgccaagtgtaaactttccctgaatgaactttcagcctgaacaattttcttactgacaactatgttgcttgtttttaccattcttcagtttggagctctggggttacaaacgtgtggaggaaattatttgggtgaagaccaatcaacttcaacgtattattcgaactggacgcactggtcattggttgaatcatagtaaagagcattgccttgttggaataaaaggaaaccctttagtcaacaggaacattgacactgatgttattgttgctgaagtccgtgaaacaagcagaaaacctgatgaggtacactcgcttctttgattcatggttctatactcgccgcaaaagcattgtgttttttcttataaaaaaattctaactatagtttataatgtttttcttccctactgtaataataaacatgctcatttcaaggctatactcctacattctttaaatttgttttgctgtgcagatgtaccccatgctagaaagaataagcccaaggacaaggaagctggaactgtttgcaagaatgcataatgcacatgctgggtatgctcctgctgtgtattcttcttcccctagattattttgtcctcaaactagatgctaaccatttacgtaccatttaccctttttctttgtttgctcagatggctttctctgggtaaccagttaaatggagtaaggcttgttgatgaagggttgagagcacggtacaaggctgcctatcctgattcagaggtgcagccaccatcaccgcccagagcaagcgcccctatagatggtgatcaaggcacatcacagaaacctactgtatcagacggcgagaggcctgcctgatgtgaagcagtcggcaccttactttgaggactatgacattgaggaatcatcgtgcaagaatacaaacactttggacgacataagtattttatcactcgtcagctttaactccggttgtaaaattagttaagtcggtttacttagaagttactccagttgtaaaattagtaagtcgattgtttttggtcgcttgaggaatgcaggaggagggaagaattgttgggttttgtaatgttggcagacatccatcttgataatggaacgcgtgagccattactgatcttgttaacatgtcagcacgggcaaatcctgaatgcaacatttgttcccgtcctggaaaaacagcatgtacgttaactcatgctgggatggctaattagcgcaagtgcatcgccacacttttctttagtattttccgacgaaactttttaactcaaatactacaactttttaactccagagcaacattacagtacacaaggtttttctaaaaggttgacataattagagtacaaaactttaacgacagtatcatgtttgctgctaagaatggatttcaggttgacataattagagcacaaaactttaacgaaagtactgcttcatgtttgccgctaagaatgtatttcttgcgtgattcatgaccagtgactatgttaacatgactagagtagagaataagctcaaggcgctgctagatttgatgcttggtcgctcaaggcgctgccaagctgatgcttggtcaggcctcatcctcatcctcggggccttccttcagcgccttgatgaatgcgtccagagattactaacaagaacaataatatattgtttagggtgttaatgaagtatttacctaatgaatcaattatatgttgttcttgatgaaaaaaaaaactagcctcgatgaaaagttgcaaagatcagcgctgaattcatcaatgttcatctcatcaatgataggcattttatcaagcgttgacaaaatgacagtcaaaccttctttcttgtaagaaagtacacatgttagaacacggttggatcaaaggtaactctcaattcctatatttcttctttcttgtaagaaagtacacatcttggaacacgattggatcaaagataactctcaattcctatgtttacttagcatcatgaaacaccggtggaagaccggtgacatatagatcttataagaactcatccctttcaccttgcacgaaagtgcacttataaactttccattttagacaacaccttattgagagctgtcgtaacctttctaatcacaacatacccaaatcaaaacatgcacggcagaaggcttgagagcctttgtaatgtgccataaggtacatgactaaatgaattaaagtggcgggaattaaataaaatcttatttcagcccattactttcgtaactggcccgtcctgtttagcgtgagcgtggcctgtctaccggcaatgacccgacgcagggcgaactaagcgtggcccagttgtattctgcggcccaaagaccacgaggcccaatagcggtggtggccctacgtggggctgatatggtccatccgatttgatggacggctcggatcagtcccgtgccgatgaaatcgccggtcggaggggggaggggttcgaaaaccctaaccctaatcccccttctcccctactctcctgatccaatctctggtgatgcgagagagtggacaacgacgatggtggtgacgacagtccgtcgaggtggagcacgcacgcagcagcgatagcgagtggcaccggcttcaccggctgggaggcgtgcctgagggcagcgccaagccaagccacagcgtcaacagtccaatgaagcgggcgcgcaagtagaaacgggtgccgagataggctgggcttcgacggcggggggtgggggcatagtaaaaaaagccggactggtaagtgacccggccgacctctcggttcagcggtctgccggtctgaccggtgacccgggcggtcgaactgcggttcacaaactacatgtatattacatattcactcatgtaatggctagctctttgctcttgtaactcttggacccgggttcgaatcccatgtagtgcaccatttcttgctatttttgccaaaaaaaagaccaccagctgcaccaaatgggcctttaaacagcccattgtggcccattagtatggctagccggttcaaccagtgccggtttagtgtccggttcgccgaaaaccggccggttcaggcgggcaaaaataagaccaacagctgcaccaaatgggcctttaaacatcccattgtggtccattagtatggctagccggttcaaccagtgccggtttagtgtccggttcgccgaaaaccggccggttcaggcggttcagagcggttcgattgcatgtctggtctttaaaggaaaccgaaccgtggtcacctttggttctggttttttccgatctaaccgccaggaactcctagaaggcgcgcaaacggggagcccaacgcaaccgcgaggaggcgaaggtgcatgtccggtttttaaaggaaactgaaccgtggtcacctctggttctggttttttctggtctaatcgccaggaactcctagaaggcgcgcacacgggaagcccaatgcgaccacgaggaggcgaaggtgtggcagtgtcgcttcccggtgagacccacacaacggtggggtttcccggtagaattagggctccaaatccggtaagaatatgaactcaagcctaattttcttaatttgatttggatttggatttgattcagattttggggtactcttcaatttggggatttcgggaaaattgaaaccagatgggattgtcaggtgctattgggctgcaccttgggccgtgccagctattctccaagttgagcccaagtaagcccaaggagaggggacatatacaaaggcaacggcgacacttgggagggaaggaacataactagcaatcggcggcttcggctacagcagcggcaacgacttggttcggttgaaccttgttgatctctattcctctcccaccctctctcttgttactcttcactaatacttctagaagcttccggaatctagtagcttgcatcctttacatcttctcatcctgtccctattgtattttcctgagattgcattgaattttagttgctcttgagattattgagttgagaagaagaggttgctaacactcctcttctacgcccatgctgctttctcccatcggtcgagcaccctggaaagatatgggggaagagagtggagagggagcaaagggaagtagaagatgtggttacactgatatgtgggatccatctgttcttttttaatttttgtctttggtgccacgtccccatcatgtcatgtaaaatgcttacaatactgatttgggactagggatgacaatttcccccgcggggccgggtcccctgcggggacccgaccctacgggggcaggggccatttctgacccgtgggtgagtcgggggcagggcaccgcatttgggcggggagcggacggagaggatattgaacccgggggatatattacccctcgaaatgtagcccatagaaggcccaacaagcccaacttagcaaaatactgtgatatatgagcaaaaactaaacatgctaaccctaccttatcctctcccgtccatcccatgcagccacacaggcacggaggtggcacactcctctcgcctcgcttttcccttctagatctcgccgctctctctccgtctcttgcggtctcgccgtcgtcagtcgccctcttccctcccctccgacctcctgtcctctccagtctcccctttccctcccatctccccacggtagcgcgcaggacgacgcacgggcggcacgcggggaggcgcacaggcgggcgtggcgagggatgcggcacggcgcataggcgcgacggctggcaaggggacaggcgcggcgagcgggcgacacaggtgacaggcgaggtgaaacacaccgagaggtatttcactaaattggtgaaatgttgtttgtttattgagtgaattgttgtgtcaaagtatttgtgaactttgtggtcatgcatgcattcagatcatggacggaacgatgtatcatggaaatatttgtgttcttgcttgattctatatgatagtcttgaaaaaaaaaatttctgattggatgaaaatactacccaatacggggccctggtcgggttgtgggccggggggtgtcgggggcggggcttaatttgcccccgcatctccactcgtgccaggatcggggacggggccgttctagtctaacccgtccctgccccgccccgttgccatgtctatttgggactatatttctacggttattgcggcattgggatgtaattcgaacggcgtcaagttgagcgaccttgagtgaacttattccttctcaaaattggggagcttgcgactctggccattctgctcacgcagtcacgctaggcccaaggcccaaaaacactatccagtgggctcaaactagaggcttctcttctacccagggtttagcgtcggatccagtctccaccggagcgcggggcggcggattccaaggcggcgatggagttctgcccggggtgcgggatgctgctgcagatccagccggccaccggcgggaaccgcctgcgcttctactgccccacctgcccctacgtctgccccgtcaaaaacaaggcacgcctcttcttagctctctccccccctatcacttcgcctccctacttcgtctgcgactttgcgtattgctgccgcggcctccgcgtttgattgatgcctttcgcagatcgtgaagaaggcgagactagtgaagaaggaggtggagcccatcttcagcgacagcgacgccatgaagaatgcccctaagaccaccagtgagcccttcgcccttaactttcttgttaagacaatacattgggattaattgttgtcttaactttttttgttgagacaattcgttgggaataattgaacttagcttctccattatactgtgtatcatctgtatgtcatgaattgttgattatcttgccatttaaatttaggtgaaaaatcattgctattgccacaccaatgggaaattttgttctaaatgtacttgctgatttttgtactagtaattgtttttttttcttttcttccatccattgaaatgtatagctgggtaatctagccgcagtccaacataaacgaaagtgttttatgcacatattctgtcttctgagtttgtttagcttatgtcgatacaggagacatgattgcttgttcataaaaaaaaaaaagagatgaaaaatatactaaaataaaaggctcaaatttacttcacagccaagcagtgctggtttgaagcataataaattaatatacttcttaagctatgataaaatccaaatagcaccagatttcgtccaagtaccttcaagaaacttgctactcctatgtatttcgttgtttaaagtcatcattgagatgggaatgttcattaggggatgtctggcacatatttattaggaaaccagatgattgaatagttatgggtgcttctagttttgatacattgttaccatggccgtggtatactatcatgcatgtgcgtgcttagttccttgtaaaaaaaaggagtaaaatggtggaccatcagtgctttcttttttcaagcatctattctgtacactttcaacacaagataagattgcttgttgtgttgacagaataagcttgtatcttttgatagtggaaggacaaaaaaaaagcatttttcaaagctgtacctgaatttatttagctgttctgattataatggcatgtctccaacccaacgcaaataagttcaatattttaacaatttccacgtaaagaaccctgacctaacatatggttaaacattttaataaagttctaatggttgtctgaattagtgaccctagaggtgacattctgccatacataatcctaaatacattcaatgattttgattttcagctacatgcccaaggtgccaaaatggagaagcatactacaggcagatgcagattcgatcagctgatgagccaatgtctacattttacaagtgttgcagagaagaatgccaatttgattggagggaggactgactttagtaatatttcttgtttaatgtgtgtggatatttttcctgctaaaactatgtaatcatatgaaaccttttgtaatcagctcatgccgcagcaaagagccaaagaaaacttacacatgggaaaccaacgtaccacaaaatatcgtgatattttggtctaggcgtgtgccaaagtcccaacctatcgtggtgttttgtctaagaatccgaactgaagactggtccattaaggcattaacccaaaaaagaaaaggcttctcacaccctcagaagttagattttggtctttgttgccttgttggtgttagagatgtagattgtcctggtctagaacacgagagcatgaataaacgagaagattgcggccataaggcctcccgctctgccgaatgatctacttaggttatcatcaacaacagcattttgcagcaattacggcatcaaacattcattaacaccatcaaaatatcatgctgtaaactcttgccaaacggcttaataattaccaacaagctggctttacagcattgcagactacagcaacgtttaaactaaaaattattaacgttgctcaattatgtatgaaacacaagaaatgttgaaccaggaagctggaacatgaacatctgaacattctttcttatgatgttcagatgaaacacaaaacttgactttatacatcatcatttatctggtaaccacttcttccgggctccttccaaagcttcttcccgcatccttgttaattcacgaaaccattgctcgtactgagcttcaatcagaccaagctctccatttaacacatctcgattttcagtaattgaaaccgatgcaccgatcaccaactccgagtgatgtgatgcttgatccatctgaaagattgcaaaattacttgaaccattacttaacggatgtctgcagcccagtttatcggttcctttgtacgcaccacattccagtgtcctgtattcgtcaacgccatactcactaagacttttggaactcccatcaagctgaacagaaatgtctgacccttcagagctatttggtcctcctagattggttgcattcaagagagaatcaatataatcacttggtgatgcattggcttctttcgaatgcatcataccttcaactagtacataatcatgtgtcaactccgatggatgctgctgggaagtaattacgtgctcactttcacccattttagattcgctggaagtactcattactgcatcattcatcagctgctgaccagggacaagattcactatcaaaagatcaataaaatcagcaatgaaagtaacatcacagtctgctaactccaactgctcgaccatttcagcagcaacagacatagctgtatcagaatccaagtagaagagaaaatgaatgttccttgcatgtcctgcaaaaataaaaatgatatcgtatcacgagaacacaaaagataaattcaattaacaatagaaagtcgtaccacacaaatcggcaattcgcaaaaccagtgatactgaattgtcatcaagtttctcgcctgttagctttagctctgtgtttttgttagttcgcgtgaactccaacacagatctatgtggaccaccaagatcatttctcttgcatgtgctagtacacatagattcattggtgtcaacatccatgtgcaaagcttccaaagagacatctactgatttgggtaatgatgacggaaacttagtgccaacaagaacactagaattatcagagcaaagaaaggggtcttgcaatagttctttggcagacagcctttcagaagcaggaactaaacatttatcaataaattgttttgcctgaatatttgtgattttagccagagcagccggcttgacaccctagaaatcagagatttagataagatagtgttgaggcacaattatacaaagataaattaataaatacttaccttagatactttcttaaaaatttgagctgcatttgtacattcactgtaaggatactcaagagtgaacatctccaacatacacattccaaatgagtatatatcaacaagttcatcataattctcatcatatagctcaggcgccatgaattcaggagtacctgcagaaagtggacccatatcacagggatgtatcaggagaatgcagaatgttttctgtggattaatttggcacctgctaacatgcttagatgagaaaaacaggtgactctcacagttttgtattgtggacctatttacattagtttatgtttttaagtgacatggttggtgcatcgaactcaattcagacatagctgaatattgtaaaaggaatgtaaaatatgaaatgagcagcataggatcaacatgtaagatgtaactataagaatattgtttaaagggttataaatgtggtataagcaagtcaattttgagttaatggaatattgaaaccccaagtatatcggtcacaatacttgtgtgtgtaacacatcagatataaatgttgacaagtcagatcagtaatggctaattagctatagaagtggttgacattgcccatggattatgcatttagttgcacactcaaaatcgtcatttagtctgtctctccaaatcagaggacaataattcagaaataacattggaatcacaaagtagcagaaggttattaccaataacactttttgctctaggcgttagcatcaccgtggctaatccaagatctccaatcttaacttctccatgattcccattgacaaaaatgttgtcacacttcaggtctctgtggataattggaggttggtgggtgtgcaggtaatccagcccacggagtacctgtctagcccaattctttattgccttcaagtcaacacgtggatgtttctgacgatacctataagcaaaaggtaatggtgtcattccacaagaaacatggtagtattaagaaggcaagactattacttagttgctacttactgcctgagacttccagatgtgaaaagttctgtaataacattaattgtcttcttttgatcatcaacccaataattatagaacttcattacgttttcatgcttgagagactttagtagatgaacttcagagtatagccgttcaagattatctggagattgcataacctcatctatctccacttggctccatgcaacctcaatgccttcaacctcatcaaatgccttgtaactatatccgaattaagcatggatgcaaatagttacaaacagcccgatgtaaacaagagcacagacagaaaatgagcaaggtagcattaatacatttgcagctattgccattagaaatgtataccctggatcccattcgatgtttgttctgtaacagtgttgaccgtactagacaccagcaggcagcaaattaaagagattaacctccacgtaaaccattaaacctaaatcccacagcaattagtaggcctaaaagttgaaacagataaaactccttaggtggtcgttagtttgttgcttaggccctgtttctttcagcttaagattattataatctagattattgagtcagattactataagctagattgttataatctgtagtagaataagcggttagttgtttctttcctagattattaaagcctagattattgggtttgcaagtctaaagagggagtgggatggcatggtgggtaatttttcacccaataatctggaaaaagctcacataaatgagcttatcagattataataagctggactccagattataataagctatttcaataagttgtctgtttcttttagcttactcccaataatctggattataacccaagctgaaagaaacagggccttagtatttcttacctcttaggacgatatttggcatagatatataggtgctaaaaggctgccaagacatgagacgattgctagaatactagtagtccttaagttgaaagtttggaacctgaaattctctaatttgaacgctgtttactaccctgcttggcttcttgtgttagccgaaacatagttgcatatatggttaatgcagcattttttcctagattttgaaaatgtgacaacccattgcaatataaatatatctctttgacaaagaagcacaaaaacaaagaagagattccaaggacatacacagtcttcatagctcctctccctagcacctcattgtactgcaccagggaaaaagttcagatgaatacagcaggcagagttcaggagtggcacatttgtggataattttgacaaaattgcatgcagtttttttttccttttggtaatcgtttgagcaaatttccagcattttagtaatgcatttcaaacatattaaattctatgagcaagcaaaatttagataagcctttctgtaccagtaaactagaagcctgaaaattttaatgcaggtatccgttcatcacaaacttaaatagactagcatgggcatgtcaaatcacgttcacatcagatcaactaaaatggaagaggttcctatcagaaaataaatgagaaaaaaacttacgcgtatgtaccgcctggtcggatccacctccacgcactcagcatcgtccaccttatccagatcgccgaacacctccatttcagatcaccccacgcgcacgaacgaatcaggaagcagagaggaagcagagcgagatgagccaggcgagatcgccgggacagcgcgtggagcggcgcgggcgcccgctacgcacggcggtcagcagctagagccggcgaccgatgcagcggaggagagacggcgcggggcggccagttaattatataggatcgccgggcgttcggtgaagggctcggagaacggggccggcgacggcagctcgcggcggcggcggctgctgcggagcgacgtcgccttcaccccacccgcaactcccatggcccggcacccggcggacgccacgcggctggcgcagcacctcattcttctcccccggtcggtctcctcccttcgtcgtcggcggcgcgggcggatcccatggagggctacgcgaacggggacgcgggggcggcggccatggaggagaggcggaggcaagggctagggttaggaattcagcggcgcgccggtgtacggatgcggggaggaggcgaggaggaataagaggggagaggtaggtggtggtggggagcaaaaggtgggagagaaatagtaaaggcctggagcctttattacggttcgggagcagcagctgcatctgtgaactgggatgacgctcatattactccgtcacacaatgttagcattttttatatggaaacggtatttaaaaaacaggtaaaatgattggaaaaatattataattggttggagaaaaaaatagataaaaaattaaatagaaaatgattgtgattggttgagagaaaatgttagatagagaaatagcaacattttagaataagatattgtgttaaagttaataacattttgaaatagaggtagtactcccttcataaaaaaattgtactccatctcatattagatttatttttttatgcaatgcaggaagtacgagcgattttggattgataccaaaatgtgtcctaccaatttattggtatcttgaatagtaatagtatggatttggattgaagccaaattattgataatgccaatgatcaatttgtcactaatctagaaccttcttctttatatcatcaatatttgacatcatattggtagtaatccaaacatgtataataaatttctatcctaccaaaaaaattggtagtaccaaaacatgtcaagaatttggtattaccaatgatttggtaaggtagagaacaaaacaacccctacatggtacgcaaactcatatatactgataaacggtgatacagttaatacgcatgagcgaaaatccatttttaccaggcttgccgttctttttttttcagttgagaataggatgaaaatttctggattattgtgaaaaatcaaaatgactgccaaatacaaagtgaatacttattcattggttgggtctagataagttcaaccgaaaaagtttgatgccaaattattcctcatgagaatctattaactttcggcctcttgcttttttaaggagattcggagagagaggaaggatgcttacagcctagattaggcattctatacattctttttttttagaccatattatctacgtgtacaacatgttacttgtcatataaacgtgaaaatacatacaagaatgcttgtgctaggcgtcgaaaccatcaagaaaaattaggcaggagcaaaacatccacccgcccacaagccaatcccttttctgtctctttttcccatttccttctccttccccttttacctctccttgagctagtggtggttgtcgatctggttgacaagggaaaacgagcatccgttgttggtaacttgggacatggcgaccacatgtttcctcaaggcgtcagtattgttgaagttgtgtccatcagggaggtgacaatgaattcgagataggtgaagaggatatgtgaacatattgccggccaaagttataggctgatagcacatcccatccagttcatctccacaagcgatggctacatttggtcctccatgttgtgcattttctaagtgcagtttcccatgaagccatagagtgcttggagttggaggtgccaaggtagactgtaacaccctgaaaattcaagacaataaaaatcactaaaattttaaactttttaaaatttttacatcatgctggatgttatggttgcttttgcttgccaaactataaattgtcataatggaaaattaaactaaagttatacaactaagtaataattataataataagatatttattatgaaccctataaatatttacgtacaagaaaacaaagccagaaaaagggaaggttaattactaatttaatttatgaatcaaatattaaatacttgaaccatgtgatgcgtgccatgaaatataaacacttaggaaatgataatcgttcaaataaatggaactctatctatagaatagttttactgggaaaaattaattagatattatataatttgaattgaatcataaatgctaaattatagaaatccatgtggtggtaaaaccaatccaagaagataaaccaatatgcgtgaaaacagataaataccaaaatcccaaatataggaaattatagaatctttaataaaccttaaatattggacaatattaaattttgggcaaattcacattgaacacttaatacggtcacccaaatgcttaggagtaaatacaaaattaatttgcaacttttctcaatttatatatcaaccagagccgtaaaagtaagaaaataggaaaactaaggaaaatatataataataataaggatatgttcaatattaaatttgaatataaatttcgatggaataacttagattttgtgtgaaacacattgttaggtggcaatagtccattttctaaattagaaaaacatctaataaaatccaaataaatcaactagcactgttcattgccccctaggtgctcgaccctgtcccatcaccgccctccccctgcccgcgccgcgcctagccctgccctgccctgcctgtcgcgcctagccctgccgcgccgctgccttgtgccccgcgccgccgcacgatatcgtgtcgccgtcgccgtcgctcagacgtgccgtgcgccgttgcttcgctctgcgcgcgccactgccgcgccccctcgcgtcccatcgtgccgcgcgccgtcgccgtctccggtcgtgtcgcctcgagccccacccctccgctcgtcacgtcgccatcgccatcacgtcgtcatcatcaccgcgccgcgtgccgtcgccatcgccgtcccgtcgactccactgccgcgccgcgcgccgtcctgtcgccgcaccgcgctctatcgcgacgccgtcgcccttgagccccgcgccgctgctgcgccatcgcgtcaccgccgtcgccatcaccacctcgagccccgcccgcgccgcgcactgtcgccgtcgcgctcgccatcccaacgccgcgccgcgccgtcccgtcactgcgtgtcgccatcgccccgagccccgcgccgccgtgccatcccgtcgacgtttaaagccggccacccctcccccgagccctataaataccccctcctttcccttccctccccacgccattcccccctcttctcccctttttcctctttcttcccctccaccgacgccgcattccgccgccgctgccatgccccggcgtctcgccgccgccgcgccgcaccccgccgccgttgccgccggtccgataagccctcccgcctcccttcatcgccggtagccgcgccgcgccgctcggccgtgagagagagagaggagaaaacagagaaagcagagagagagaaaatagaatagagaagagaggttagagtgggcccccacgtgattagtaaatagtaatccccttaatctttattagttaagtctattacatgtaggtccgggtggttaaaaatctagttatggagagtttatagtttcgagtctatgacaagcgggccctactaggtttaatggccggtttgaccctagtcaaaggagtcgggcccacctgtcatttgcccatatggattcctttagaaagaaaagtaaaataaaagaaaagaaaataggaagaccccacctgtcagtcactatagcttgtggataaggttgtattataaataaatgaattaggaacagtaccatttcgcaattattagaattaattcaaatttgaatctttacactagcataacttattcattttagctccgatttgagtgaaacttgaacctaaattcatctaaattcataagctttccaatggtatataattcactatttgataaaatatatttataattattaaataattaatatcaagatgatgcataataattaacttaaaaatgtgctaataaataaaattgatattgtactgtgaagtagatgtcaaataattgtctttaacacgctttctcactataaaacctatgtaaactaattaggagcattgtttcaaattaattaaagcataggaaatactagtgccatttattaatatatgtcaatatataattatactcatgacgtccaaattgtataaataatgtttagcctcatactttgtgactaaaagttgaacacacgtagatgagtctttaacttgtttatgagagataataacagagctagtgtgactaaaatcacccgcacgaaattaattaacggcatttcctatacagtagtatatgtttaggttggaaatcgacccttaagttgtatagacggtaattcactcataaatccacttaaaatcacatgtattgtgtagctcgtagtaaatagtaactattcaaataaatgatttaatattaagatattgtgcacacacctatactgtacatcccattatagctatacggtatagtattaatttgcttgttgcatatattaaattagagggactatatgataaacatgaatattagacaaatactagttataaatcttgatctcatataattatagttcaattgtaaattaggattattcattgtaaaattatgtgatgggataatctgtaaccataatatgattatcctaaacaactctaacatacaaagcatggataattattaaccttttctaatttattgtgacaagtaaaatattttcataattaaagcaaagcctccatcaataaaataataatacaaatggttccctgcgattaattgcttgatcccaaatccatccgacgacaacagaacctctagtatatgaccattttatttagatcaatgcatgtgtagccataatccttccatagccattagctagactaaaccacatattagccagatatgtatctcgtttatactacgttggctagctcctaaatagaccaccatgacaacagaaagattaagaaactttagcccttagcatgttggaatccatcagcaagcgcgaataatatgagcaaccctaggttcgacctcatcaaatatattttgtttgtgcatatttgattgttgcttgaatattggtttttcttgcgtattatagaaattgtgtatcgatcagtcgtaaggcaacgtctacaacttccaggaggtgaaggttgaacaataattatatcaagaataaggactatcatgcgcaggaaagtcatcactattccttgaacatgttgatcccaattgcgaaattattttgtttacaaataaaattgcatgcaatgaggaacatcctacttgtgattatgccatgccttgattattgtttacccccttattccttcgtaaccatgtttacgtatgagtccctagtcaattatgacaattgcttagaaatgctattctagaatcatgcatactcatatttatcaaatgctatatgcttgggcaattacctttgggaaggtaattgagatgcggcatgtggagacatgagcgccatattgccatgatgttgatgacatgatttgtggaaggagaaataaaactaaacaactgttttcgactggggcggacggaggatttgggtggtatctggaaaaggctagtaccgtccccggtcaattaaggaccgagccatgaagttaagcatgaaacgacccccgtacaaccgtacttctcgaatgggtatagacctagcggattagatagccgagcggaggcagtatccctgcatagatggttcacccctgagtgaggcaggtgcgctaccgtgggacaaccgttgaggtagggccgagaggcgtgccctacatcggtgtcgccattggtaggactgccatgagtgtgtgagagagataacttaacttgaatcttaatttaatatgtgtatgagacttccctttcccgggagcgccagaactcctctcactgctagaaacatggacacttagagtgcatgaggatttaagttcatggagcgggtactgccaatgcgaggttatcgaaaagctttgtcgtgacgcgtctcatgtgttgggacgaggctcatgtgttggacaattgcggagtgcgagtaaagtgtacatccactgcagtgtgagtaaaccaaatctattcgaatagccgtgctcgcggttattgagcaccgggacatgtattatacttggctagactctagattcttaacttgtgtgggatgggatattgcatgatgatttttatgctgatggagccacttcctgagaggagggaaggtggacgtcctcagaaaaccatgacgactcaatggcgggaagctatccttgggatcacaatggatggtggacagaaccatcgttgtttaatgtgaacattggtactaaaatttgatcagtctatgctagattttaggcttctgaaaagaattgcaaaacttgctttgcgcaaaagaaccgtggctattccttaaaataccccctctatcatatgcattattgttgtggtggcttgctgagtacggtcggtactcactcttgctatttatacatcttttaagagagtgttgaagagaagcccttgtcggtacgcttgcgtatccaacaagatgatcggagtgcggtctggttctaggtctcgttccccagtcgactgcctgtggcatattaaccgggcccttatattatttggtcttccactgctgttctctgatagttgatgggctacctggccctaatgtaagtatttaactcttttagcctgaattcattcgtgatatgttgtgattcaactatgtatgtgtgtaccaactactgattcagggattggtacagataaacacagaagatttccgatttacaaaatcggaggtctacatagacagagcaggagcttacgcaatcagcaccattggttagtgtagcctacgataggaggtgcgggctgtggttgatgacgggttcttctcaagtaatcatgattgctggtaatatagccgccgtggtggctatgcgggagaggaagacaaccaatcttgattggcgtgcttttttatttgacgtatcaacatttgaaattcaatgttttatgcacgaggagagaaatattccaattagaattggactatatttcacatttttatttttattatgaaaatattgtagcggttggaacttatgtgtcatactcatacatagaaatgagatgtttcaaattagtttggacaatggttcgaattttagtttgtttttttatgtttcgctccatttctcaagatgttttatctgtgtctctcttatgttactttattgcgtactagtttgtcatccatttattttaaaatgtcataattacttttttttcacaatgtataattaatgctacagttatggtcaactgaaataattacagtttagcctgatttttcataaaggcccccacattataggtgaaacacactgtatcattcttagattgactacgttctttttagcttatttatcgaattattaaaacaacttgtctattccacgtttcaaattaaaaatatgtttgcaagaaagtttcttctaccgtattttttagattaattgttttaaatatatgttaagtttattccttagaaatctaattaatcaacgaatgtgttgctagcaattacttcatccgtcccaaaaaaaaatcaacctagtactggatgtgacatatcctagtattacgaatctggacatacctctgtccagattcattataccagaatatgtcacatctaattctacattcgtttatttcaggatgaagggagtatgtaaattgtttccaaacaaatcggtgaccgaaatgacaacgacacaaactcgatctagaaagagcaaagactaaagagcgacagggacagatgatccattgataattattgtacatccgacgtgacgcgaggcggtaaccggaaaatgatatgtgatgcaactttggaataagttcaccttaggtccctcaatttgtcaccgagttctaaattcgtccctacatcacaaaaccgaatacaatgcatcccacagcttagaaaaccatgcaaatgaggtccctcgacagtattgtctccgattttggctaacgtacgcctacatggcactctattgactaggtcttaatcccacgtggcgcttacgtggcaattcgatccgaaaaaataataaaacccgtgagacccacgtcagctacacacataaaaaatgatggtacccatgtggcctcacatgtcatcctcactaccctcttctttgtatctatctttttcttttctttttcattcttttttcttcttttgcttcgcgtccggcgcttggtgggagcgccgtgccggcggagagggcggccgacgggagcgccgcgagggaggcggcgagctcgtcgggccggcagacaggagaggagcggcggcgctcgcaggccggcgggagggcgggagaggagcggcggtgcgcggggaccggtgggagggagcggcgtgcggaggccagcgggagaggatcagcggtgcacgctggctggagggtgggagggaggggagcggcggcccatgccacgccggcggagagggcggccgatgggagtgccgcgagggaggaggcgagatcgtcagggcggccgacaggaaaggagcggcggcgcgtgggagccggcgggagaggaggcaacgcgcagcggccgacgggagggagggagaggagcgacggcgctcgccggttagcaggagggaggtaggctcgccggcctctccgccctggttggcatgtctcccccctccccgcctgtccctcatttactttttagttttgctcatttattttttttcaggatttaactgtcacgtatgcgccacgtcaatgacacgtgggacgaagatctagttaaagaagccacataggtatcacgtcagttaaaccggggtcaatactactgagggatctcatttgcactggttttgtaagttggaggtaaccggttttccgtaccgagtatgaaaatcagactgcgcgacaaattgagggaccaatagtgaacttatcctgcaactttcagccaatttacggccttattgtctcaggcctaaccatcttcgtttcggaagaagaatctcggcctggaaaaggcccggtccaagaacgggaggcgagacggaccagcgacgcgtctgtgcgacggcatgtcctaaccgcgacgtgagcgcctttttgttgaccgtgcgtgcgaactgtcgcaagatcgcccgtgcatagacgccaatctccggatttgctgtcgtgaccgtgccatctgcggtgaggcggtgagcgacacaagcatttctctatcgtacacaccacgcctctccaggatgcctgcaagaccagtacaacatccaagcacaataagaacagcactcgcccagagaacacagcaaattaaaccaccgatatccgcttgatcgcaccacccatttttacacttttccgcgcgtgtacttacactgcctgcgaccgccgcgatcagacacatggactgcaccaaggcggagacacggaatgctccgaagtggcagatgacgatgccgccggcgggaggcgagtcgtcgtcgtcgtcgtcataaggtccggccgagcgtgcgcgggcacggctggtctactgcgcggccgcgctccaagccaaggtgtccggctccgctaagaaggtttggaagattggcacggacgatccccggaaggcgacgtacggcgtcaaggtgggcgtcgcgctcaccctggtctccctcttctactacgtcaggcccctctacgacggcgtccgcgggaacgccgtgtgggccatcatgacagtcgtgctcgtcttcgagtacaccgttggtaaaaaaaaactacaatttgcgtgcacaaagccacaaagtcgcaactcacgaccgtgcgacgcaccatttgattactgccttattgagtttggctttgcttgcttgcttgctatctttggtttgcacgtacgcgtgtaggtggtagcatgcacaaggggctcaaaagattcgcggggacgatgagcgcggccgcgctcgcgctggggatgcattgggtggcgagcaaatccggcgaaacgttggagccgttcgtcgccagtggctcggtcatcttgatgggtacgtgtccaacatcgtcatggccattggcgtagctagggggtagtcctggtgggctcgggactacccccgaatttggcccagggagccccacccccccaaaaattttagcccagacttaagcccaagaagccagcccaataagaaatgaaaaattagaaaggctagggtttggagttcgctgcaacccgacgctacttcgtttcgcacgcgtgtgacgaccgcccatgccgccgccgttcctcctttcccggcctcgccagctcgccttgccctcgcattggttccgcagctcccacctctcccctgtcgttctttgtccgccgaggcactgagccgctgccgtcgttgacctcccggctgctcaatccatggagaggcggactgacggaggttagtggcgccgtcacgccgctgaaccgccaagcgccgctggtcgccggcgccgggagcccaaggcccctggccggttggccctagttgattgccgctcctcccccttgccctgcctgtgccagcggctgccttagtagcctatgacgaggtgagtttaagtgctaactggtgaattgaagctatgagcctatgaaatcaaatagatgtatatttctaactgtgatttgtgcatcagttagttagtgaatgactgaatgtgtgacgttgacttgctatggaatgtgaattagtgaattagagctatgaactgtgatttgtgatagtgctaattggtgaattagaactatgaactgtgatttgtgaatcactgaatgtgctgttgacttgctgccattttattttagtttgtaggatttctttggcaaattaagtagtagttttgataaggttggttcgagaaattggaacaaatccgacgcacttgacaaacatgtagggttgtaacaagtaaacacaataaaaaagcttcagagaaattatttatgaaagatgcaccaattgctatatttctaattttgtatggccttttctctaaattttgatctgtatatgggatttacggtgattgaaaaattttagtatgtgatgtgaacttgtgatccatgaagtaggactacccaacaaaaatttcctggctacgccactggtcatggcaacatactactacgtatgttgcagctactgcagccaccttctcgcggtttataccgacggtgaacgcgcggttcgactacggcgtgtccatcttcgtcatgacgtacagcttcgtcgccgtgtcggggtaccgcgtcgacgacctggcggcgctggtgctggacaggatagccaccatcgccatcggcgtcatcatctgcctcgccgtctgcacgctcatctgcccggtgtgggccggccaggagctgggcctcctcaccgctcgcaacatggagaagctcgcgtccgccgtggaggcctgcgtcgaggactacttcgccgaccccacggcggcggcggccaggtcggaggggtacaagagcgtgctcggctccaaggcgtccgaggactcagcaggccgcgcgatgggaggcccccgcacgggcggttcggcttccgacacccgtacgaccagtacgccaaggtcggcgccgcgatgcgccagtgcgcgtgctgcgtcgaggcgctcatcagctgcgccggcgcgtcgtcgcgccagcgagccccgcccccgcgtctcctcggcgatgcgtgtacgagggttggcgcgtggtgcgcgcgggtgctcaaggaggcgtccgcctgcgtcgccacgatgacgacgtcccggggccttggcttcgccgtggcggagatggacgccgccgtgcgcgagctgcagagcgacctgcgggctctcccgcccatcctagccgaggaagcgtcggagacgtcgctggcagaggtcatcagcacttcaccgttgctctgctgctaagcgaggatcgagggcgtcgtccacgccgtcggcacgctggcgacactcgcggggttcaagccggccgacgatgctgacggtaccgataagccagaagccgaggtggcacgttcggacgagtcaccgcctcaccggaaaatctggcaaacacgcaccttgaacagagtgaacattttagcaagtgacaaaaaggggtacaagctgctagtaggtgtcaaagcagaacattttagcaggattccaatttcaaaaccgtggtgcagaggtgcagtgctgcaccagtacgtatctacatgttcaaacgttggtctctgcttctctgggccttagtgaagaactttcggcccaagccaaaccaggctttggtgagaaaatgtacagcccaagatcagatctggacttggacagaaatattaggcgggcctgatgctgatagcttccaggcagcactggtctttctattagcccggtgtctactctctacaacaatttcagtttctaaaaaggaataagttcacttcatgaccctcaaaagagacccgaatctaatccatggccctaaaccgcaaaaccggatatcttcacccccaaactattgaaacgtcagcaaaaccaccctccaaaaccaccaagggagtcaaattgcaccggtttcaatagtttgggggtgaagatatccggttttgcagtttagggtcatggattagattcgggtcacttttgagggtcatgaagtgaacttattccttctaaaaaatcttctaggatttttctgaataagtccactttgataccccttaactagtggcccaatctaattcatacccatgaactgtaataccagatatctcgatcccccaactattaaaactggtgcaatttgactctatcaacggttttaaaggatggtttcgctaatgtggcgctttgacttgttccaacctatggagtcacctgtggggcccacttgtcagtgacatttatctttcccctctcaccaccgctggtagggaggaaggcaggaagaggcaccgcaccatgccagtcttctcttctcttccgcttcagccacgcctatgccctcaagcaggcaagaagttgtcagtcattctatccgcttctcttcccctacctctcttggatctcggcaaaatcaggcacgcggcgacagcggaggggaggcggaggtgatggcgtggaatgagacgaagcagggtaaccactagggttgagagcaacagcggtggggaggcgaaggcgatggtgggagggatgcggggagggatgcgaggaggtggcatgggatgagacggagtggagtgcccgccggggcgttgctggcggagcaagtgtggcggctttccccacatggggttgaggacgacagcggaggggaggtagaggtggtggcgggagggacggtggtgtgacaatggcctcccttctcaccgctgccttcatcctcactcgtgcttcctcctcccttacagcggcgagcggaagggggaagagggggcggcggcgcgacgacgacctcccctcatcaccgccgtgttttgccggggaaagggaaggaagagaagaaagagtatgcgacactaacgtgcgggccccatagggtgacttagcggattggaccaagccaaagcgccaagtcagcgaaactgtcctctaaaatcgtcgagagagttaaattacatcggttttcacagttggggggggggggtgtttcaatctccagcgccaaatttgctatgagatttcatcgttcaagataaatagatggatctgttcctttggacgacattggttttatgcctttatccacagtatatcagcaaagaagatcctttgattataaaaatccaaaaaaataaaggttttatgtatacctaagcatgatttcagccatgggaagcttgatcaaatctgcaaggaaatcatttctggtttacccatgggagctgaactaccgttggcccgttgcaatcatctgaaggataagctagatcatatgtcattcggaagcttccactgatcgaagaacgagatacatcactatgacggccaagggacaattatctcctacgaataagacctgcaaaccttttgcagacgattggtagtaccgatcatatgaccgatgcggaaatccttttataaagactgtcaagttgatcatagaaaaataatgcaaggatagctgaaagtataagatcgatccccgcgtgaatgcacgatatatctcctcgaaataatgttcagagatcgtcagaactttataaacacgcaaaccactttggctaatgcttatgcattacccagcggatatgccgcggaacattatctcattgtcatcacttatcactcatcacttcattagtcgggtcgggctaaagatcatcaaactgatcaatgatcggtcgagctagtgctccctgctgccatttcacacttgtatgtgcatgcatgtgtgtgaccgaattatcatcatctacctatttcttccatccaaactcagtgcacaaattttgtactccactagccacgaaccggctgggccaactcctatcctggttttctctggatctcgtcaggtgcagtgcagggagggaggtagtgcattgtatgggtttgcagcacgccgccgttgatcaggcagacatgggcaacttttccgttccatacgggctgtccaatgtccattgcccaaattaaatccaagataaaatcaatatccgcagcgatgcgatcagaaacatgaggcaatatatgcgcacaaaatccccctagtgcgtggcgctgctgtactgcaacagagcaaaaaccgtgcatactgccagagaaagaaaagcaatggcagcaacgcgcggacgaaagtgtatttggaaatgtttaatcgtggcctgtccctcggtccctgtaaagcgaccttatcggcttgtgcgtatgttgggtcctttctggtagagtacaagcggtacctgcttctggtacgtactgctgctactaccgacagttttcaaaaaaaaaaaaagaagaagaaaaagaaaaccaaagtataaaactcgttttataaaccgagaaagaataaaaatcagttgagtagattgagtttttatgagataatgatgttctcaaaatttctctgaatttcgagtgcatggcgtttaaggagaggggaacatctgagctcatatgccttgcagtgttcctgtaaaaatatcaaataatgttctgttaatatatgtacaaggtagtagtacatcatgaatgcgacgatacatgccgacttttatgacagtggtaagccggttttattcgtcgtgtaagccgtggtatgaagttgccaagattctctccactgtaaatcgatagagttattctgttaatcaccagaagaagctagcaaagagcggtggctcagccagtttagattcaatcatgtattcgtgtgttcttccggtctgactcgtcccgctggttgattttgtgcggtttgatttgatggacgtttttaaagtttagacctgttcagggtgcttcgttgtagtctggctttcatgtgtcgacgcgtcgtgatcatccggcacgttcagcgggtgcactttcatctcggtttgtcccttcttgtcgtcatcatcctccacctgcttgaagctggcgaggctggccagcgtctcgacggcgtcgacgacgccctcgatcctcgccgatatctctatcagcagcgacgccacggtgaagagcggcatcgcgtccatcagcgacatctccgccgccggttccaaggccaggacgggcgggagcgcgcgcaggtcgccctgaagctcgtgcacggccgtgttcatgtccgccacggcgaagtccagcgtcttggggctggtcatggcggcgaccgaggtggacgcctccctgagaacccgcgcgcactgcgaggccagccgcgtgcacacgtcgccgagcagccgcttgacgtgctcgggcgcctggacctcggcgcggacgcagctgttgagcgcctcgacgcagtacgcgcagtggcgcatcgcggcgcccaccttggtgtactgcgcgtacgggtggcggaagccgaaccgcccgtgcggcggctcccaccgcgccaggttggcctgcgagtcctccgacgccttggagttgagcacgcacttgtacccctccgacttggccgcggcgggcttcgccgcgaagtagtcctcgacgcagccctcgacggcgccggcgagcttctccatgttgcgcaccgtgaggaggtgcagctcctggccggcccacaccggccagatgacgacgcagacggcgaggcagatgacgatgccgatgccgatggtggacatccgctgctgcgccaggtccagcagctggtcgacgcggtaccccgacacggcgacgaggctgaacgtcaggatgaagatggtcacgccgtagtcgaaccgcgccttcaccgttggtatgaaccgcgagaaggtggccgccgcagctgttcaccatgcacgtacgcacgcacgcattattttacttgggtgtcagcgttgcacgtagtatgtgactgtgcaagtctttgtcacggcttacgaaacgagcctaacaaaacaggggcactacgtacggtggaggtaggcttatcaaatacgtacccagtaaaaacagggagccgctgaggatgaacggctcgagcttgtcgccggatttgtccgccacccagttcacgccgagcgcgagcagcccggcgctcgccgtcgcgacggctctgttgaatcccttgtacatgcatccacctgcacacacgcacgagtgtacaaaaacacggtgaggaacacagcaaactgacatgcaagagcatgcagaattcaccacacgacgttgtactactactcaccgacggtgtactcgaagaccacgacaaccgtcatgacggcccacatggcattgccgccgacgccgtcgtacacgggcctggtgtagtagacgatggagacgagggtgagagccaggccgactttgaggctgtgcaccgctctccggggatcgtcggcgccgatcttccacaccttcctggcgaagccggccaccgccgccctgaccgcgaccagcatcctcaccacccacgcccacgccctctcggcgacgccggcctcgtgctccaccgtcaccgacgagccctccggcaccgtcacccgccattccagactgccctgcacctgcgcttccctcgcggcggcgtccatgctgatggcgaccggtacacgagcgccgctgcacacaccagatgggtccctattgtaagcctcgattctctatgtacgcaacgaaaatgcggcctaaatttgcttcaattcgctcgcctttggtaagtacgactgggttgacctctgctctcgttgctttcgtttctgtggcaattattttctggacacacagatatattcctaggaagagtaaagcaagctaccaaagctagtttccaaagagaggaacgtgacaaaggcttctggccaaatgtgatctacctccctatgttggaatgaagtgagaagccatgatatggcttcgtatatatagccatgagagctccggcgtattggactttgacaagggagcacgatcaagggcgatgcaaaagaacgcttgttgcgctgcttgtgtcagccaggcaacgacgaccttgagcacacgaaaggctgggtacctgttagctgcggctaacgggctaaagtgcaacaaccatacagtgcattttggaaagaagattgccgctggaaatatgccgggaagtgggatatcgccaataggacggcgaggtgcggtgacgactatggtgcgatttcttttcaccttgttttgcctgccacgtacgtctgtgcactgttgtgtccctgatctgacttaactctcacttctacgtttgtggcttgtgttcgggcgcgactataaactctctaagctcaacgtgttaccagaattgatatcacgcctgcagcctggtgaagtggtgagggtacatgcaggtacaagcttaagctcgaaaccgtttagctcgttgacgaaaagcaaaagcaaaagcaaaacggatttactattttacttgcgatagatttttgacttctatcatttactttttcgttcgtaaaatctttcatcaaaattcgtattctcgtgtactcaatttacggtcacactcagttacagagcacttatactcagttacaatgtacttatacttagttacatagcacttacattcaattacagtgaaccaaaattatattttacaacagttttttttctagatttacgatttttttttatatatttgtctctttttcttgttatttcatttaaaacgggctatatccattggcatagttattaagaccagaccgaggatcgaaccgctaaggcacacgattcactggtttattggtcggaccaatcaaaccgctggtttaaagcggttcaaatagatgtgtgttataatacatgaacaacatgtgacatagctcgatggttgagacactccttgaaaagaagttcttgggtttgatccctcttagctcttttcctgttttctctaattcgaaactataaatctattgaaagattaataggtagtcccaatgagactttattgcatagtctacgtaggtgataccccgcgctttactgcgggtctacgtaggtgataccccgcgctttactgcgggattcatggataagtatatattaaatattgtcgaaatgatgaaagctgaaatgttgagaaaataatgtgaggaagataatttggcacatacttgttgatctttataatataatattgtagatgatgtgtcatgcttacatgggttttaaataggttataatagtaattgctagtgagtgaatatgtggcatgcttgcatggaattgcttacatgggttttaaataggctataatagtaattgctagtgagtgaagatgtggcatgcttgcatgggattttaaatgggttagaacagtaattgctagtgagtgatgatgtggcatgcttgtatgttgagctttagcttctaataattattagtgggtaccaactatatagaaagtatagattgtttcacctgcttcctatttgaatgacctccaataattagcagtgaactagaaaatggacaatatgccactctattcgtgtgatttcaatgaaatgccacatgctagaggaacgaaaactggagtcctcatccctcttgggttttcgaggcatcaacggtatatgaactaaagtccctaaccctcctaggacttcagggcatcaacagtacatattcaagagacagacaatatctatatactcaagagatttatattatctacatcttcgaggtgtcgagaagagagtcgagatctatatgatctagctatgtcttcaaagagttgaagatacaacttgcaatttttggcatctccttcaagctatgttcataactccttcatcaacgacatcttcgagaaactcgtccaaatcaacaagaaaacctatgacttggccattggagcggccaaggattccccgggcatgtagtgtgccccggatcacggagcccgccccgaaacaagttgcaagcgactcagggccccaggctagggcccaagcacaccctctacctgggctctccgtggagaactccgcccatttataggtaatggtgggtccggaggataaactttgaccaacaccatgatttaactgcagagtgcagcaacctggaaagcagctcaaccgcatgcttcaaggacgtggcatcgcacgcgggctcccgcatgcccacgtcaactgaaggaataggagggacgtgacatgttgcccctcgttctctcccacttagtctcacctcggcacctcgtggaggctgactgatggcccatgacagccgggcatagactttcttgcatgcagctccacttgtcagccgctaggtaaagttggcatattttctaatcaattatcttaagtttggctaagtttataaaaaaatataataatattttcaacacaaaatatatatattatgaaaatatacacaatattatatttaatgaaactaatttggtattgtagatgttgttaatgttttctataaatttaatcaaatttaatcaaatctaaagaagtttgattcagaaaaaagttaaaacaactttgcctgtttcctgagagatatggaaaaaaaaagaaccaaagatctttcagcacaaggagctctcggcgtctagcccattctccaaagtcagcgaggaggccaaaatgtaggcactcatggatgctagaaagctcaccgcttggttaactttgtcgctagaccggatctccggtcctaacttgtagatattttgtctctctatagttttctcatgctcttttaatgaaattggtggctcatcaatttgtttaaaaaaaactttgcttaaatcaactagctaccactacatccacaatcatagcacctgggacaatacacaacaacatatatacaaaatatatttggaattgctgaagatgccgccgcaaccatcacatcttgtttatatgaactatggttgacctaaaaagagttaggagcatatgattactgtacatgttagctatacttaaacgctatggatttaattaatactacctccatattttaatatatgacgctgttgactttttgtccaacatttgaccactcgtcttattcaaaaaatttatgtaattatcatttattttattgtgatttgattcgtcatcaaatattctttaaacatgacataagtattttcatatttgtacaaaaattttgaataaaacgaatggtaaaacgttggttgaaaagtcaacggtgtcatacattaaaatacggagggagtagctatcagttagctttatcattaacatcaatagagagcacaaatgctatgttgctctctttttcaacaatatcaatcatttatcactcgaagcatctccaagagctttgctagatggctctccaagaaaaaatttgacaaacttgagaaagtaaccctccaacacccttatcaacttgaccaaagtcctttccctgttggccaaatctgatcagccaaaatcgttggccatctatgggccctaccgtccgaatctcccctttcccctccctcgccctccctactctctcgcattgtctctccctctcctgcattgctcacttgcattgtcgcctccctgttcgagtgcaatgccaccacctccccttccgtgcgcagcgccgccgcctccccttccgcgcgcaatgccaccgcctttcctttcgtgcgttgcgtcgacgcctccccatccgtcgtagtgttaggccaacaacaacactaacttggccttcatccgctaaaagtagcaggtggcccatcgcatccctgatctcccacgtcgttgtcttccgccttgccgacttgtcgccccctccttctccggcctccgagcgccatcatcacccatcctgatttgcagctattgtagaagagggtttagacactggcatgtggacccataaaatttagagagtgagagatactgttggagcacacggaaaatatagagaagaactttttaactagctagcttaccaaatgagcaaatagaaatcaagtttcgacaaggctctggaagatactcttagctaggtcgcctcttgacacccctatgtatccatacatcattggtacttttcccttgctagatgagttgcaacggatggcgcagcggcggccgtgcaaggcgcatgccgtcgcactccgcacgattttcccgtcaattattataccggatggaaaagagaaggaaacattcgaagacgacctagctagagtcatagagcaaattacctagttccaagttccaacgggattggccatgaaccggaaaagaaccagagctccactcatctaggctctagcgtacttcgtgcgcgcgtacgaggccggccgggtagtggcagcagctgtatccaacagatctagtactagcccgctagcgcggccgaaatatcacgcgcgcgcgacgcgcgatagccaacttgcgcgcgaccaaccggccccgccccgcttgcaactacaactagtacttaagctagaacgcgatagatagcggcttctccggaccccatggccatctccatcgtccttgcttgtcaccaacatcatcgcgcctccgtactacgtactcctcccgcactttggcgtacggcgacgccgccatgattgctagctctttctctcctccggtgaatgcatgctcactggtcagtgttgctgggtggactcgatcacgatggtgtcagtggcgagcacactcgggcagcgcatcaccgtcgccgataaggacgctgcgtcatccgtgcatgcgcgctctctaggtacgtagtgaagagatcgatcgacacagaatctttgctttgctgcgcactactaattcacgaaacttccttcttcggtagctgtaaaatatcagtgcaccggtgtatcctgttgcgcattcgacttcacccaaggagctgagcgagtgagagtggccgtaactattacctgcacacaggtggttgcattctcaactgaacagtcgcaaagctatggcactcaccggactgcccgttctggtagagtcccagatgaaccggcaaaatacggcgagcacgcaaggtgcaggaaaacgcaccttaggatattctctgctttagacagagatccccgttcctctttatgttctgaatcgtacgttctaaagcgagatacacataaaaacggcaccttccccggtttctacatacgtacgttatcgattttttagagcggaatggataacgctgctagcgcctagctgtggccactgcccacagcggcacacggttcaaagtgaagcactgtcatgcacattttcgagccaccaaattgactcactccacactagtatatgcaactgtaccagtacaagttgtgttttacacccctagtatagtctagttccttttcttttctacatcaaacaactttgcgctgcacgattgtaataagaagtggtgaccgatcgaatacctgcatctttgatgtagaggttggtttgatttctactagtatcatcaaagaaaattgcttgtgcaaagatataatggatcataaatacgtcgaactttccaggcatcacaatcagattgttcgaactgaattgacgccacgttctcagcacaatcagcagcgcgtcgtatcgtatgcgtgcttgcttcgtgcgcgcgtaggctgttcggcatttggttctacactgctacggctaccgtgtcggagacgcgtttttccggcttcatcgatgggtgggtgccaagcaccgaggcacacagcatactaagctgctctgctcttctatgattgttcaattaattgtgccctggcgctgctggaacacagccgaactgcttgtgcgacttgacaaagcgcagcaactaccgaataatgttcgcctcatccctttctcgttcagataagagggccatatgcctgtaataatgtagcgagctctttttgaaaatatacgatggcattcaagaattgatcggaaaaaaatggaggcacacatgagtacatgacgtgttagaattatttactcatgatccaatttacttagcttaacacatactttctccgtactcgtaaaggaagtcgttttgaacagcgatacggtctccaaaacataattttgacttcttgtttctataaaaactagcatgatggcccgcgcagattacgcggctagcatcattatattttctctcatataatagcatatatattttctcattatatttttcaaatatattaaaatggcaacataattttaaattttgcaataactttacaaaactactaatgtgtaatattcatattatattgtattacgtgttagttattaattatttttaatatcaaaatttagtaatttgtaaattatatatattcctatatggactctagactcgtcttttaatatttatttttttaattccgaattttctgtaaattgtatttctatatacactctatgctcttcttgtaatattatttatttttatttctgaatttttattatttctaattgtatttctatttggactctaaaactcatctttcaatattctttaatttttaatttcgaatttcagttacttctaaattatattcctatattgactttaaactcttcttcccgtgtttttcttaatttcgaattttagatatttgtaaattatatttttatacggactctaaactctacttttaattttattatatttattccaaattttagttagttttaaattcctatatggactctatactctacttctaatattccttattttttaattccgaatttctatttttttcttaattatatttctatatgaactctatactctacttctaatattccttatttttaattccgaatttcagttatttcctaattgtatttctatatggactctatactctacttctaatattccttatttttaattccgaatttcagttattttctaattgtatttatatattgactctagtctcctcttctaatattccttattttttaattccgaatttctactatttctaaattgtatttctatatggactctagtctcctcttctaatattccttattttttaattccgaatttcagctatttttacattgtatttctatatggactctgtcttttctttttctccgattaatgtgagaatttctaggccatgagagcgaacgtggagggtccttttttattcctttaataatataatagatatttattgaaaagtgatatatgtatacttttatgacagtatttttcaagacaaatctattcatataatttttacattttcaaactcaacttgagagttatttatgatttatattctcaaggtttgtcttaaacattaacctaaacgactttctttacgagtacagagggagtaatcaccttgatataaatgtaaattaaggtgtttactgaccaaatgaattgaatccataagttgcttctgttcattttcttccttttgtccttcttcccttcttcctatttttcttccctgtgttctgtacgtcgggtagaggatgcaacgctaatgcacatagcactacgaatcccttctagtgcaatacatcaatcggactctattagggttttgggatttagcgtaggaattagtcgtcacttcttctcaacactttctttcctttcatttgcactagtggggttcaggggtaatccggatagaactctaggtcctgttcgtttccactaaaaaaaagtgaatgaaaatttggatactcatggcacgcttttcaaactgctaaacgatacgtttcgtgcaaaaactttcaatatgaaagttgctctaaaatataatattaatctattaatcatacgttattttttttagataatggaatagataacatccggcctttgctcaacagagttacagccaattattacattctatcactcgaacaaagagtgtagttcaaatagaattaaacacacccaaacattataaaagtgaccagaccaagataaggaacacacaattattcaagtatatttgtgaacctccatccatggttggcaaaaagttgcataaccgtcgtctcaagcttacggcatgcaaccttcaagagctctccatcttcatcacacttttgcaactgtgaccaaaatcggagccaatatgttgccctgaaaattgcctgcatatatgaagcagatagtgatttgttaaaaaccatatcattcctactcaaccacaaagcctaacatatagcagaagctcctacaagaattagttttgcgtaaaaacttaatttttatcttcatcttcgtttacaggagaatagaacatcacctaagtttgttaccacttatcatagtaacgtttatctcttatcttttattttcttatttgtttcttttttgttagggaagagaacgatgtaacttatctctccctaattatcttggcaataactgataaaatcaaccaccacaacgtagtagtacagagacttacagattgctgcgcattaaaatgttgtttatgcagaatatgtaaattatggaatatatattcagttttctcttaagtacatacatgcatgtgtggactcggatcatttcgtttttacttgcgaaagtacgacaccaatagtaaccggaagcttcagatcaacagaaagcaacagtgtcgcgcgctcgtgctgtacgtacctgctattctgtcacgggttgaatccgaagacattttagaggctgattgggtgccgttcacagtttgctatggaagttttggcaaagtgtgatatgtcatgagtcgatgatgaaggggtctaatttctcaaatgtgtgacacgtcgcagttatggtaagaaccaactttaggttgaaatggtaaaaattttgatgcttcacaagtgtggtagagtttcactaattctttattttttatctcacaaaacaatactaattctttttttttcttttgccttcgtccttaacaccacattgggatgctacgtgtttgttttcgtagagggagtagttggcagtgctatgccctttctacagtgatgcaaacccagtcaacttttctcatctctctcctatgcgaccacttgatcagtatccaacagtgagtaccctgattttatccctctctttaacggtaccaatagcaattaacaaattaactttctgaacttgtcaggcaacgtgaggtcaccaactatctcaatcagcagctaataaaaatcacaactccagtaattaatctcaacgctgatagattaactagacttgcatatatagataaaattcagcaggaaacaaaccaaataatcgagagctcggcgtataacagttgaagaccaaaccctagataaaataatcctctacccgtgctttctacacgatcagaagaaagggcactaacatgtaccaagtagcaagaccaggaaaataatctccagacctagcttcttctccaaccttcacggcggcagcaataatctcaattcgcatatgggatagccatcagctttcctggagaactctcaacagaacgacacaaaaaattcctccactgatacagggcagatgagatcagctcttaataaaaggagcacgcaggcccacatgaagtctgttcggactgacagactcaactaataaaaatagtaaaatgtactaattactttggtaatccagccgctaatgaccctattaatgatagttggttaattagcctatcggtacaggaaccgaacctatatatatactccctccattttttaatagatgcgtcattgacttttttttcacatgtttgaccatttgtcttatccaaaaaatttacgtaattataatttattttgctatgagttattttatcactcatagtactttaagtgtgatttatatcttatacattcgtataaaatttttaaataagacgaatggtcaaacatgtaagaaaaagtcaactgcgtcatctattaaaaaacaaaggtagtatattctttgaattgctcctgcacagccacttgtatttctccaaccaaaaatgccctggtcttggacacatcacaacttgtcattaattaacgtggatcggcaagtagtagcggagccaacagcattatcaagctcagacaactaacaatagcgttttccaacgataacaattttttttacgagccttaatgataatttgtagacttgtagtggatgtgttagcaacggagcctgggcggcaatcctatcagctgcctctgccgctttagggctaagggcatcatcaatgcatatatcaaaatcaggtattatggtggccccggcgagtcccaacgagtatatttgacatctccacaatgtatatgagactagaaagcaatagaactggagagaaaatcaatcatatctttctataaagttgatgtttgctaacttttaaagcttagcatgcaagtgtgtcacatcgttaccctagtaatattatctagagtatttcaaatcatatgcaagcgtaccacgtcattacccaccaataattattatctacaatattttaaatatcatgcaaatatgacatatcatttacaattttattgtatttttaaaactcaatatttaagcaatgtaaaatcattatgtgcacattattttcgtattatttaaatatatatctatcatttgcataatatataaaatgtattcattcacatatccacaataaagcgtgaggtattaactagtttttttaatccagcttatacaaaagcctcctatatggatcaccttcacaatctatagactacttctcaagaggcttaacacccccttatttacaaattatgtatgtcctaataagacatgtaataaatgctctaatggaaaaggtttaaggaaatacgaagcccacatgcaaggaattaaaattctgaccgagttttcacgaccgattcagctgccattccgtgacaacatactattattgtcagtcgaacactgtactgaactattgaaccactaaaatagtgagcaaggtacggacgagacactattactatactaactgctaagcaggcctaaaaatgcgtttgaccctctcacaatgactaaaacacaccagtttaagaaaataagactaacaatgtactatatccattttctaaatagatgatgctgatataacgtttgccattagttttatctaaaaatttaatataaatatacgcaaatataagccatgtttaaagtttttaatgacaaataactcacgaccgaataaataacacttgcacaaattttctaacaaaacgaatggttaaacatagtatcaacattcaacaacggtatctattaaaaaaatatctattttcaaattatatatgcaaatttcaaccctaaccactgcggcagtgtatgtccaagtacgtacgttatgcgtacctgaaactgaaagagaaccgcatagcatcggaccaaataaagcctgcttgagacttgaaagaaacgtgatgagatcgagctcaacggagtagcgacgtagcatgggagcttaatttcatagttaccacaagattgaatgatgcatccacacatttgcgtcgtaaaacgataggttcggcaggcgccaccacgattgacgggacccagtgtagtacgtgcgctatactgatcacacattaggtctgcctcttacttttttcgcgaacgcaggtctgcctcttactatatcgctatatcgcttgctaatcaatcaccacctctgccttcacgacccggcagatctttatctgcaatgctggaagcatttgcacgcgctgacatggcactgaagccttcctacgtggaggtccagaagcgtcgatgtattgacacgtcggcgctgtccacatgcatggctgcgcggcttcgctcagcgtagggcagaaatggcttggattaaaagacgcgaatattaaagaataacctaatattaaataattagaggggtaaaactttaaacccagatcatctaacctatcatcttgtgaagtttagccggaaaaccctatcttaaaaaatggcttggattaattaacttgttagcgcgctgcgcactaattaaccaaaagaggttgctaattatcctcctctgatctggtctctcatcggagcatctgtccgtcggattatgtagattaaaagctaattcggtaagcgcacaagggttaaaatgatcacaaaatgagggttgctatcatgcttggggaaaagggaatcccactcactatagtcagatcttttttattgtgttttgtgatcccatgttataattaatcctcggtctaatcatggtttaggttaaattagttaaagtaaaagtgattgtaggagcaaaacataattaatggtcggaatggaggctctcctttagtataatcttgcgggcttggaaaagcaagcgaaatgtaccctcttgtacttgaaaccactagtaatgggatgatatttcgatggatgtgggaaagaggtgacctgtgtttagtggaaaagaaggattgctgttgttgcagcagtgtgcaccccaggatttcgcgctctctgctggctgatgtgtcaatgtatcatgttcagctatagctagtgtgacatggagatgtctctctagaatattgtagtcctgcaggagaagcaaaattggactgtctcatagtactacaaccaaacaagattagatgggcaatagaaactaatggatgcaaggtaccacatcgtcaggtgaaacatgaaaacaggacgaggatgatggcatcacttaatttgtcagttagggctggttttgtttgagatctattggtcttaccaatatttggcaatttcaaaagtgtttattgtccatttggtttggagccaaattttgacatgcctaagaaaataggccatttcaaccattaatttaggctattttggcttcaatacaaacacaattttacctttgccaaaattagtcatgctaaaagttaccaaaatttaacattgacaaaaattggtaaggccaatttaggccacaaactaaacctgcccttggcactgatagaatccagggtgccaaccacatacggaacacatgaaactgcgaaataatgaggcatggcaccgtttgtgctagaaaagacagcaatagtcaagaggggatagccatccatctttgaattaagaagaaaatccctcaaagaaacctgtcgatcggggctcttaaacccctctgtatagactgtagtgggtgaacagaaagccaaataccccgcaaaaaaaaaacagcaagccaaataagttatgtgatctattctcacctgcttgtactaacacattttttttccggatctgatttctttcggcctcattaccacgcgaaaaaaaaaatcaaacatacgtgcatcgaatttgaaatgtgagacattgagaccactgctaagagaatttccgccaatctttagaaaaaagatatcaaaaggtaaaagattggagacaggaaagatatatacttggtgtaaaattacagtcctttagtgcggcactcataattttggtctcgatcagcaccattgcaaatttggacctgaaaattttgacctcgacggtgtcaaacaccaggctgacctgccgcggagacaggaaccgaatttttttcccccgtcgattcgtacgcgcatgtcttgccattttcctcacccagtcaccaaaagtcaccaacgccggctttaatttgttatccagctcagggctgaggccaacgacaggccgtggcgccgtgcgtgttggcatgcacacaacagagaccagatatcgatttgcgagattgttcgacgatggtaatcttccaaggctggaaagtccatcgaagcgaaggcatccacaataacgctttcgattgttttgccatggagacatgataagaaaaacagacgatacacagttatctagctcatcttcaccatatatatactagtacttcctcactccgtcaaaagtttagagaaagtaaaggagaccatcacccaactaacatattggtgtgattaattaagaggcctttccacgtcctgcaaaggcggcaattttgttcacgactctgtttaaagtgaccgcagcctgaacggatggctggtgagtgcaagaagagagcacttatcgtggtgcaaaagacgctatcatgctttgctagggctcggtcgggaggacgacggctcatattgagatgccaagccgcctatcacataagtagtggaacgaccaaacgcatatcgtacgagcgaattctttccagcacgcgacaaagaacaacataggagctagtctactctctagaggcatgtatctgcagattgatggtgacttaatctggcctttcccctccggtgggtggcgcacggcggttggtggaggaaatgctcaccgatcaccgagaggaagtgtccttcagattttatgcaacttgagataattttccttattgctatgttaccgctgaataccgtaggaaagatatgatcttcgcagtggcggatcttgaaacttcctagagcatagcaaaacacgtgttaaagattttacacaatgttgaacaattaataaaaatattaaagtcattcgactaatcttagtgtgggattaggatcctctaccttcgaagtcacatgactttaacattactatgagcccgataaatcttgtatccacgtattagtgacaaagatacagtaactttgaagataggggatgtcaatcgcctagtgcagtgtgtgatcaactagcaagcctagtgtcgttgggccttggatcagcccctagatctttgtagagctcggtgaagtaatgaactgcttttggtcaatcaactctgcatttgtaaggctgagttcgaacctacatgttcaaaacttctctttagcacgaaaaatagaatgatttattagcacatgattaattataatggatcagctataaaaaaaccttgaacatggagtaatatgattttttaatcaactttcctatagaaagttttgcaaaaaacgcatcgtttaatagttcggaaaacatgcgcttcaaaaacgagggtagaagttggataatgggagaaaagaacccactaaagctttgtcataagttggtgtggcgtcgaatatatttttaacactacttaaaaaaaagattttcgtatttcgtagatttttttttcagacagcttaaattttgaaagccccatttcccaacatgtcatttcgaaagggaataagttcactttgggtccctttatttatcgcccaatccgattttcatcccttgatcgcaaaaccgggtacgacgggttcccaacttacgaaaccgtttaaataaggtccttcggcagtatttgaccccggttttggctgaggttgcgtctacgtggcttcttttgactaggtctttgtctaacgtgtcatttaaatgtgggccccaccattttaaaattatttttttatgtagctgaaattggggtcccatgtttttttattatttttccgggatccaattgccacgtaaacgccacgtcaatgacacgtgggacgaggacctagtcaaacctgccatgtaggcgtcacgtcatccaaaaccgggcacaatactatcgagggatctcgtctgcacggttttgtaaagttgggggatgcattgtatccggttttctggtctgaggacaaaatcagactggcgacaaattaagggacctaaagtgaacttattcctttcgaaaggggctgacaaatttcgaaacgcccattgaactgccactcccagtcgccccgctccgattatcatgagtccaatttagccgaaggacccttaggcacaagatttgtcagccccttgcggccggcttccacgccggttgggcgaaaaaggatttatcagccctttgtcgtttgatgggctttcgagatagaggctcaaataggctttgaactagatgtaaatgggccatagtcattggacatgagtactttccttttgggcctctacaaatggattagaggttgcaaagcacgcgtcacgcggagaatttaggcctagggatctcggacaaatacaaaggacaaaggattctgttactaaagcaggcctccctgacgtccaagctgctaagtactagcacgtctgatgatcacggaccatcaaccccgaatcgcacgttatacgatccaagatccaaacgaaatagactacgccaaatcctacactatactgctgacattcgtggccaaagcctgcttcatggtccatagacaaaccactgttgttccttcctgacaagtcgtcaaaccaaaaatgggagaggtacggtgttggtgaacggagtacttactcctaccaaacgagagtgtactaggagcaacaaaacacgcactcatccccctatttatgtggcgccaaagcagcagtgccaccgatcccgacgtaacagaagccaaccgaaggtaaagggagggagggcaactgggcaaggcaaaagcaccggggataacgagcgcgcaatgatgccacgccgcggcgggcgggccaaagcgtagtacgcgaaaggaggccacaggagtggaggagaagagagggaagtgaacagtctcggccggcccaaagcggatggccccgagccaatcgccggtaaaagcggggggcgaagcgcccgcctctcccgcccggaggggccgcggcctcgcgtgcactcacggcacgcgacgcatgtggcgtcacaggagaagacaagacgaggcgcggttggtgtcccgcccgcgctcgctcgatcggcagagtaggccggttgggctggggtcgcgcgcgggggggtctctcttgcgggaatcatcgcggcgcaggagtaccaagcgtgtactacgtgttaacccgctgtgcaacgcagccgcgaagcattggcgatggcaccgcgcgggatggccagcgtgcgccctgcgtgggcggcaggtggccgacaggcgccgggccggggcgggcgcgagggacgaggcggagcggcgtggtggtggtggcgacggccggcccaggccagggggctggaggagccacgtgacgatcgacgtgaggagcgcccgggtctctcgcggcgttcgaggagcggtggtgggcgcagtactgtgtagcagaccgccagtggtcggggggctggtgctactgtagttgctctgtcgactgtcggagcaggtcacgaggcggcagcgggacattccctggcccctgtcgtgcgtgccccgtttattacggctctcgatcgaccatttgcaccataggtttacgggttacagtacgtacttacgtttggtgatcgaagataacggccgtcggttggccacataatttttgtgtgcgcctgaatcctgaggtaccccagattccagttttagcctcatgtgatgtggaacgatttggaaagatctgctgggacgagcgagccgcaatatggagcgtgcatgagtagttgtgtagtaccaaacgcgatggatcaggacgctgctccatcccccaattttggtgggggtggtccaatccaaggccttgctcggccaaaagatctcgcaaacgtcgctgttgctttcttcttttttttttcgctttccttttcgtggtccacggagccactggcgctcgaagaccgtgagcagagtgagccagcagcaatcgagcatgcatgagcaggaacaccactgcaccaggactattccgtgccccacaaagacaaactgtaaaaactccctgcacggcatacgtccctgccgacgtgtgcgcctcgcgacgtgccacgtctctccgcgggcccacctgtcacctcgagaacaactgctacttaccataaagaatctggcgtcgatcgatcacaagctgcgtatgcatgcccacttgtacaggtttgctgctggattactcctagatcgatgctgtacctgtactggagtggagtgtatatcgatcgctctcgatcctcatcgccatcgaggaagatccagcccaagcgcgcgcgatcgcgatcacacaaacgaccgatctagtgatcatcagctagctgttcttacgctttgacggctgcatccatatagtactgccagtgggctataccacgtaactatcgaaccttcaggccgagattatattaggcgattactaccatgacgacgaccctgatccagtccaaacgctacagtccgccgatccgactcatcacagctcgtcgttctcgcctcggctggtcttggatgcaaccgagcgccgacatgtttgaagtccgaggctgcgagctcgatcgatcacggccgctcgccgactgattacccgatcggcacggcatggcgacacccaccgcgctcgctggctcgctcggtcggggtgtcgctgaagcaagcgactgtggatggcctgaccagctcgcgtgacgtcgatggccggccggacgacgacgacgtgctgcgctgctgccatatatacgatcgaggaaggttggaggggagggaataacggcgcgcttgtgaggttgctgtacgcgtaatatcggccgcgtcgatgtcgtcgagctctgcatatggtgtggaatctccccggtgatacgatgttgctttctagtttgactcgatccggccatgttgtgaaaagatggtgctgattgatctgagagaaagatggtgctgatcgatctgagcgactagaatagacgttaatttactgaagtgaagtgatatatatgttccccgcaaagaaaagttactgcgcacaatgattgtgcgtgctaaaaataactgtagcatgtgtgctctgcatcaaatggtgactatatatagtagtaaacgaaaacatgttgtactactaatttgacatgcatgtatggttaagtaagcattaactagagtccggcaaatttagcacgacacatttggtaacgaactgcatccagcgttaatttcagcatccttaaaccggagtagtccatccagtactctcttcttttcacgaagtgaggggcatgtggaaatgagagctcgagcaaaagcaaggccttttggatcgtgtcattgaccttgccagactacgtacatatacttggaaagcttcaagagacaaaattatgggccttaacgccaaaaatgatgggacgctacgtgtcttcaactagcctttaactagcccttgacctcactgttgagtaagtactgcccatgaatccgcactagtatgaccacaacggatttgttagaaaacttttggtaagttttttacccctaaaacttttagatttgtgaccatcagatcatctcaaaatttatgcatgaagaaaaaatactataaaaaaatcttcacacgtatcatgcgtaagatcacagtactatctaaccaaagcatcgttgaatgcaagttttaaaagttatattgtaggtaaagtgtagttacagtgcaattatagtatagttacagtacagttacaatgtagttacaatataattacacttcaattatactatagttacgtctgaaagtttttttaaaaaaacttgcgacggttttttagatccccgatcacaatcagccgctgaacatttagtattaagatataaattgggcataaaaacgatgggtcatctcaaaattttgaatccaaaatgttgagactctctgctataagtaaaatctatagtcaaggccgcgtccaaaatactgaaaaagtctcatttggaaacatagtatagtttgaacttcttatttcaataatgataatttgaacttctatgaactcgaaatatatgagtttgtgatctaatgttcttccactagaatcgaacttcttctattacatactggagtattagtactgaggctggtacagtaggaccatacaatgcaattacacattgcagtgaatatctaattaatttatacaccctttcctctccctttgttgccctaccaggctgcaaaatgattgtgaaatggttggcgtatttggagggacaatcatgaaaagtcaggcatcactacaaaaaaaaggcagtggaaggaaaccctagaaatattctcttggtagcctcagaagtaggtgaccacatatgattgggttagcacttggtagcaagaataatactagtgcagaattaaccataggtgtcctattctgtttctgttagcaacaattgtagtactagcatgggaacatgttagtatgataaatttatgtattcgtgggcttgcaaaataggctactctatctatttttcgttttaattatttttctagtcaaacttcttttaagtttgataaaatttatagaaaatatagtagtattttcaacacaaaacaaacatactatcaaaatactttctccatcccaaaatataagtatttcttatgttggtacaagtattaaaaatagatgataatgattaaaggaagtgtgtaattggttgaaaagaaatgtaggtgaagaataatgactgtgtttgcttgagagaagaatgtaggtggagaaatagtttcattttgacaactgacctaaaggcacagtgatacagtcaatgactacaatatctttctgccacccaagtcattgcattgtcttatggcagttcatgattttattctcttcctcaaggtacgtacgccagtagtagatctacgtgccgttgctagggaaaaaaaccaataattagcgtcgtacatatactttagaatagaagtccacattatttggacagaagtggtcctaattctctgccaggataaagtcctaaacttctcgtcattcagtttaatctacggagacagttcaaactggcttcaaactgattcacgttagttttacgtcatggtgatccatatatatcccactaaccgtcgtggacttgatttgcagtattatactctgcacaaatccagagcagatatctttgagtatgagtgacgaaaatgacgctcgatgattaggactaattgctactgcttagacccatatgtagctcgacgaacatccattgaaaatgcacatggaaaaggtgcatatatacatagggcactcgatcttgataataaagctagctgaaaaagacaaggtgcactatcgatatcagatcaattctcatttggagaagtcatgtaaacatgcactttgcaaggatggatattgcagtacgttctcttcccaggaaaaaaactaggtttgaataattttagttactcctatgttgcataagttaatttcataagtaagctcatagaagattgcctgcagtgtaaaattgaattaaaaaaatggccggctcatgtaaatcattgtgaaatgtccactatttttggatagcgataagttattctatactaccgagtttactctatgcaaagcttctacctcaaacttttagaggtcgggaaggatgagttccgaaggcagcgggtgtgttcggcaccctttttcccaacccctctccctcgttttttgcgcgcacgttttttaaattgctaaacggtgcgttttatgcaaaaagtttctgtatgaaatttgcttaaaaatttcaaattaatctatttttgaaaaaaaagctaatacttaattaatcacgcgctaatgtactgcttcgttttccgtgcatactcttctagactgggaacgggagtagcgaacacacctggcaccccttttcccaacccatctccctggttttccgtgcacacgctttttaaactgttaaatggtgcgttttttacaaaaagtttatataaaaaagttgcttaaaaatcaaattaatctattttttaaaaagaattagctaatatttaattaatcacgtattaatacaccattctgttttacgtgcataatattccaggctgggaacagacagtagcgaacacaccctagtcagtattgtaacgctgggtccggtgatggtttcagaggtgagcagcaactcaacgtaccggcgcgcggcggcaccgcccgcaccggcctagctacttaatcccccgacccaaatacgcgaggggcaaaacggcagaaattaccgtctacccttgcaaattgcggtcaccaactcataacgcggcccgagaggcgggccagggaggcaccagctactagctacagcctacaggcgacctcttccccctccctttgcctgccccgccgctccccgcgcctacagtatttatcgcgccctcgatcgcacgatgtgcgcttaaacccctttgccccccctccttccccctgccctccctctctcttccccgcgcacgctacgttcgttcgctacgcacagcgcccccacgccacgcttcggttcttctactggtgcacagcacaaccggggcggtgagcttgatgcatggcggagtcgctgggactgggagcgctctgccgcggcgggggatggtgctacgccgcgatctggcgctccgaccgtcgcgacccacggtgagtcagtgagctagctctcggtctctaccgtagatccactcgatcggtgctagctaggctgctagctttgcctatacatgcgtacacacgcgattcgaacctggtagtaggcgtcgggactatttctttttccgctgcatgtttcattggataactggaaacgggaacggacgattttttcgctcccaaccttcctgattttgggcttctgattgccagtccgggttcgtaaattgttcgtcatgcttttgcgccgcggtgcttgatgcatgtgcgtttgataaaaaaaatgagacatggccaagctttgtggtactacatgtcacacagatgaacaacggttttgtaggaaaatagtaccagcacgatttttcgaatttcgagtgcgcattgagatctcaagaaccttgcagttatgtttgggaaattaagatggctgcactcttcactgtcagaaaatgataacacaattccatctgaagtctgaactctagttttcccgtatatgctcatttcttacactgagcctactgcgatttatgcacagtcttcaagaactttcttcaggccggaagtagcgtatacccactggcagtttactgttgctaccttccaatttctgcctgtaagctactagtgtgctaaccagtattcataattcttgtttgttttcacttgcaaataaaaatatttgaggaatttgcaaggcagtgctaatttactgatacgtgtgccaaagttccacagcactagtagacgataatttttaccccctagcccttttgaccacaattgtgcttcactttaagcagggctgtaaaaagtaggtttcttttcctccctttcctagacataatatgtagctccaccaaaattgacagaaagattgtctcctcttttctttttggacacattgcaaaagttaatcatgcatcatcaatcatttttttgttgtgtttctttgcttttatttccgtatgatctatgcagcttttatatcttctttatttttgggtaagaatcagtagactcgatccttcctgctctttggtaatccaagttcttacagatgcttaatttgatgtgtaaggttgcttacgatcggtgagttccacagtgaagatggtaccagaaatgttgttgagaagatgcttaatcaggtccatgttgttggagaagggtatggcaaagttttcctttctatactttagtgagttgaaccgttggagctcttctatatctatactatgcctgatattttggttgcttgtaccgtgaccacggccaactatatggtacagattttcctttcaaactattttaaaggaattattaaccattttcggaatattgactttcacaaatccgcctaactcttgcctccctaagtgtttgacttctactacttcattggggttgtggttttttctttctctgaattcctttaggatggttttaccctcaaagatcaactacttactgatattgtgtcatcttttgtctcagcatcatagggagagctctagtaagtggagagtgccaatggatttctgatacctcctttagttttgcccagacaagtgatgcagataaccaagacttatttcaggtacatatttcctatcatgttcttcctttattgggttctatttaaagtcacaattctacttttgtagacggtgtaatttagattcttagactcaaagctcatgtgtgttgacaaacaacaccacatggttcattacgtagaaaggccacatgaattcaaaataatattttcacttggcatagatccaattaaccctttcaactgtattcttagttcattgcagaaaataagatgtttctttattttaacagaagaaggttaccttcttgtagggctatacttggtggcagcatcagttcctgtgtggaataaaggtttgtgatcctttgttataattgggttttaatttttttaatgataattgaacaaaggatatactactactagctttataccaacttggagaagaatttggttcattatacctgactgaattgacatatatctacagactattgcagtaatacctattgcagatcttggtgtcgcacagtttggttccatgcaaaaggttggtataagttgacaaatgcaattaattttcatagctatccagtagaaatggccattttctacggtttcaaaaaaaaaaaaggccatttcatgattatggtaccgttttttttcattatattttgttttcaggtactgtagaatttcttttacatgaattcatttaagcggctatttttttatctatacctattaagaaatatctctcttttttgggttggaaattgtttaacaatttgtggtgttgtaacaaatatatgttctgtatatttcctcattggctcaatatgttattttgtcattatggatctggacaagccaatatgctccatttcttactaaaacacaattttcacatttaccagatttctgagtgcttggagtttctggatcaagttaagggcatattttgtcagagggaaatcgttccgtgggatctttctgctgaagaaattcaaagaaatgttctcccatatcatcagcaatttcaactcagttctctaagtagtgcagatggtcttacaaatatcaagactgacccagaaaacaagaaacttctggagaactcagcaagtgtagagtctctacgtagtttagcaagtttttcaagcaaatactctcagagttcttcaaacggtttcacctcctatgaaagctgcaacagtatgaatcctcatatagtggccatgccagtgaactccaaatcaataaatacggtgagagcatttaatagtaccggaaaattgctgcagcacaatattggttcagaaaacccactacagattaaattctgtcaacatcctgattctaatctggcaagtgcaacagacgtttttttaagtttgaacaatcttccgagaatagagaacgagatatcatgcccacctaacaagctaggatattgcatacaaagtgagaagccatatagttttcagagttcattctcatcttgtttttctgtgggtgatgagctgaagccaattttatttgacagtgccacttcttttgttcagaatgacttaatgcaagagttcaatctcactggatttacttctcaggctgattctgcggttcatgagttacccaaacaaattctaggggaaacagctactggagcattatattctgacagaaaaagtaacaatggaagttctgatttgctggatggtacaatatttgatccctttgtgcaagaatggtgcgataacaatgccttactagaaggaaacactccccattttggtgccactaccgccgattctgttacagaacatgcaagcagttatccattgtcagttgaagagaggagcttgttttcagaatctgtctttgaggaactacttggtgttagtggcaatgtgaatacggatgcaccgggtgattcagctgtggtgatggctggtgatccattagtcggccttgtctcaggctgtcaattgccaacgtacactcttcaggactctctttcagtgtgcaagccacaacaagaaccatcactggatttcccttccggtagcgatacgtctgaacatgtgccaaatggatcatcaaagatgatcccactgtccctaggggcgttgtccatggacgattgttgcagtttgaacacggcacattccaaggtcagccaggttaaaaggcctgaggaagtgaaggtagtgaagaaaagagccagaccgggtgagagcacacggccaagaccaaaggaccggcagcagatacaggatcgtgtcaaggaactacgtgagatagtcccaaacagtgctaaggtaatcagtattgaattacattttgttgtgcctaggttcatggaaactgactgagttttgttgtcttgtgcacaacagtgtagcattgacgctttgttggaccgaacaatcaaacatatgctctttctgcaaagcgtaacaaagtatgccgagaaaattaagcaagctgatgaacctaaggtatgccatgctgaacactgcatatctataccttacacaacataaactattccagttatgctttagtgcttatcctgtctttctatcatgtgaagatgatcagcaacaaggatagtggcgctgtcctgaaagagaactcaagtggtgttgtcttgaaagataactctagtgctggaagcaataatggtggtgccacttgggcctatgaggttgcaggacggaccatggtttgcccaataatcatcgaggatctttcaccacctggtcagatgcttgtggaggtatttttcagaactaagtatagtatactgctctttttgcacgatgcagaaatttgaaacgatctctttgttttctgtccgacagatgctttgtgaggaacgcggatttttcctggagatagcagacacaattcggggatttggactgacaatcttgaagggcctgatggagctccgtgatggcaagatcatggctcgatttctcgtcgaggtagagaacaagatagtagcttttttggctttgctctttctatcttcattatttgcgtgcttattctgttgtttggctttgcaggcaaacaagaatgttactaggatggacatattcttgtcactcgttcagttacttcagcaaaatagcctcaaccgatcctctgaccagatatcaaaggtcattaggaatggggttccatcgtttgcagagcatcagcaatctccaatatcagtgccggttggccttgcagatagatgacagattaacagtgaccacagacacttggattagatcagattaggaggcatcaactgaaaacattcagattgctgattgccgctggaagttgactaccaaggggtaaggtttgttagatatgataagttttgaggatgtaaaatatgtgcattgcatcattaagagatattctctccatttagtgttggtcattccaagatgtacaaatactaaacaaatttaggaatcaggcttgtaatcagaattcaggacactgttgtgggtgcatgctgttctgtgtgtagtgatttgttgacttgttttttcccctttggtgtgcaaatgacttccctaataattgcatcgtcatggctggttttttctggtgtgtatatgttatcatgagcagataaccttgtccttgatctctttctctcttgtatttcagtgttattactctttaaagaccaatcggaaacaggaacgagttcagaagtttccgtggagtgtttgatccaaaagtaggagaaaatgaggaccatcaacacatacactaggctgatggcaaagattttaaaatttggagtttattttgattatttttcccttgtagtatattgttcagccttgactttaaaaccacaaagaataagtatataacagtttactataaataatatttttagtttactaaaaataatgtttttaagttactttttaaattttgtacggcttatcggttatacctaaaccgattatataaacaaaatattagttcacctagaagattattagtagtttataaaatctcccttcgctcacctagaagactacttcacctagaagagaatactattctgccagggcagaaagcagagcgatagagttaaaatacatttcctgccgctggcccttgttgacaccttgactacgaaatgtattcgcttgctgacgacgtctgcttacttgtattcgaatccatgatgcagtgcccgtttaggaaagcttttctaaagtcaaaagctcctcaaaatccaaaataaaaaattaaaaaaaaatcagaagctctctagtttcgaagtttgctaatcaatcagcagctgaatctgaagctcctgcccatcacgtcgtggcacgatgtaagcctcaagtcctcctcaaacgtgagtaaggcccagtaactcgtggcgtacgagggcccagaaagcgagtccggcccatgaggggcccaatagcccgcacgctccttccatctttgacctcgtctcgtctcgtctcgtctcgtctcgtgtcgcctcaacccaaccccgtctcctccttcctttcgcctctcatctaccccgtcgctctcaccgtcgcgttattttttcgccccccatctttgaaccaaacagccaacctcctcctcctcctcctcctcctcctcctcggcctcggcctcggttcctcctccccgccgatcccgccgctataaatccctcccagccgcgcggctcggagacgcgctcgccgctcgctcgctcgtcgctgctctgttccacaaccgccggcggccggagagggagggaaaggagagggagggaggggggaggcgggggcgatggcgaagctgtacgtgcaggcggtgccgccgccggatctgaacaggaacacggagtggttcatgtacccgggcgtctggacgacctacatctgcatcctcttcttctcctggctcctcgtcctctccgtcttcggctgcacgcccggcatggcctggaccgtcgtcaatctcttccacttcgcggtaatcctccccgccttgcgccacgtcctccattcattaccattcccgtcgtcatcgtcgtcgtccgttttgtgagtgccactacgcgcttgctttgtaaatggtggggcatgagcggggtcgcctctgtggatctgaactgaagaggaggagggtgtgacggaattttcgatatagctgtaggtagtgtggagcgcatggttgtggatgtcccgtgtaggtgcttgtgctaaacattttgttgtgtgtgtgtgcttatgctcctctcgtttacatgccgtattgccgtattgtttggtcccaaattgagtaattgatttacatagccatcagcattacggtatggtttaggtccatctacctgatggtattagttttggcactatcagttgcttgcagtggacatacactgaaatcctgtgcagccatgcggtcacattaatgtaggtagggttagtacttagtagcttattataccagtttcagggtgtctcctcccagttcaatataaatttagttaggtttttcagaatttataaccaaaagcagaaggggaacatctgccgtgtttccatttcggtactgaattaccgactgcgatcactttctgtgaatggatagcttgtccaaatgctccctcaggtgcccgctgattcaacgtagttggttttataaactttggtaaggggctttgtaatccatgcaatgtgaagttaaagtgctaacccataaatattcagagtaataacaatgccacttctattgtgagtgccgtgctgcggtaacatgtagttttgcattgaatgattatgttgttatatgagggctatccaaacattgttgcgaatcgaagctcctttagcttacttacatttataaatggttggattattatttttacacaaacacaagtaaagccattgacctgtatattatagggtttgttcattgatactgagtttttgttacccaactattctctttgcattttcgttagcatttctctatagcatcggatgatacctaccgtgtccaatgatttcccacttaatcgaataatcttatgtttcagatcacataccactttttccattggaagaagggaacaccttttgctgatgaccagggaatgtacaacacattgacttggtgggagcaaatggacaatggcaaacagcttactcgcaacaggaagttccttgttgtagttcctgttgtcctgtaagtattcttctattacttcttagcatccatttcaattatacaaacttattggcgggcacttaggatttaggagcaataacaggcaacatgtactcaatgtttcattagcccactatagcaccatcatgatagacttggagctgcttatttgcatatattatgatttctgtaaagtcaattctgaacgaaaggctccaatcattttaaattgttgtaatatcttttctaagcccatttgatgccatctaatgttaggacatttaagttgtttcactattttacagatattagaatcggttaatgattatacatcctatgatgtagtcaacgtctgtcttaacggtagtattccacagttctgtgcttgagttcatagatatatcttatatacaccatctgaatcggatgcagttatacttgtaccttagtactaaataaaggtattcttccagtttatttttgctgtttgaccatcatagttgcttgtatgaccccagttagccttttgggagggagtgtttcaaataagtaattgatttgaacaacagctatatgctgcaatgaaatacttgatcatgtaggtagttgcacaacccttatatgatactagtctctttcccagctatttctagatagacataaatcactgggctttcgcagatttttaagaaagtggcacatttgcacaagtaactactcatgcatttaaaaatttagacataatttggcccatcagagggaataacatgcttgttttagctttcttgagaagtgaaaataaaatcctatccaatttacttgagcctgcacttctatacatttatgtctttttaatagggctctagctgaactattatgaattctcttcagcatgaattcagcctgtccatgaaaggctaactgcaatgatcactgtaaaaagcctctcgtgtttgaggttctgtattgtacttttcatagcctcaaagtagcatcacctcctgttcactgatgacaattatgatttatgttctcattttggcctgataatccccatcttgctgctaagagacgagttgtattccatcttcaggcactagttctttaaaaaaatgttttagaacagattgttaaactttcaaaacttggacttctaataacatgatacaccaaatcatgtggaaatgatataactagatttgtcccccgaaaaacactgacatcgttggattttccataaaggtctctgctaacttctacatgaaacgccacttctctagttaatgaagaaattcctgctatatttcaccatctgactggagttatggagcagaatagcagttgcatttttttttagataatggaattcatttcggcctttgctttagaaaatctacagccagttattacagaggtttcaggacaaatgattgcgaattacagaatcacagcttgattaaaaacaagaaaactacttaaaataccacctcaaatacggaatttccatagaagacagagaatagcagattattaatgccttacaattttcattcactgcaatgatacctagtcagggtgcaatgagaaaaaagccatctttatttttagcattaacaccaatattccagttacagaagatactccctgtcttcaaatacttttcactcgatattgttcatcttcaaattttgaccactcatcttatttggaaaaaatggcatattaacgaagtgtgttgcatcctacttacagtcacgaaacctccgtacatcataatctaaccattcaatatttattgtggtcaaagttaaaattttactaatcaacagtgacatattccaaaccggaggtagtagatttttggaatcagtctgaggcatggcatatagttgaatgctttagctgcattaccaacagtgattctgttggcttctgtacattgctcatggttaatgatatttgcacacatggtattataactgtagaacagtaaatatggactgatgtttcatgtgacctctttatttttcctgttgcaaatattttcaggcactgtgaataggcatcctaggtcgtttctagtattctagtcctgaaatagacaagattttagtgcctaattcagagctgctgttatgctgtcctaatatgctatgggttagggttcatatggggtaaacacggccaggaagatagcggggcggcgacggctactaggggtaagagtaggacttaggttggggagactaattctgattcatttgttaattagaatgacgatacaatccatccttatacagctggaggaaaagacccaatctaatctcaggatagggccttgacccctcggcccactaggcctcgaccccttggcccctacctatgacaaatatctttagagaaatataatgcagaatcaactattttctccatgatacatagatatgtaacgatacctgctgtgtggttttatacttgtgtcttatgtttaagatgcttattatgcatcgctgaatgcagtggtaaccattttgctattttgtcgacaggtatttgatagcttcacacactacagactaccaacatcctatgctcttcctcaacacccttgcagtcgcagtgctcgtggtcgctaaactaccgaacatgcacaaggtccggatttttggaattaatgctgggaactaggcagcaggatccttcagcagacatctacctatcttcctttccagttcatctggctcatcagagtatcaaggagtagagcttaaatgttgttagctgatgggttgtgatcgttgtatagagagatgctcagaggctgaaaacgatgctgctgtatatctgatgtacacgaattctgtagactcttaacgctgctatatgctttgatacaaatatctgtcagttgctgcatgtagagtcttgttttcagaacaataccttcatatacttgttttcagaaccatacttgtatggttctccaagataggaacacagtgcgggtcgcgtcaaacgcacaggtgatgggaaattatttcaaacagttgtggttgatgtagctttgcacagggcagcagtcagcagaagtgcgactctacaagacaccaaaagaaacacgtttgctcatctggcacgatgacatcagtgcaactcaatttagattgagttgtttcgcggcatccctaatgtgtgttacacgagggcttttttgtttttgtctggtataagagaatccttcgcccgaattgctctgtcaaaacaagaatttcttcctctttcgttttcggtaaatgctgaatgcttgagccgaccgcaaaaggtgggagacgacgccggcgtcctgccgctccatccaccatccgcacaacgtgctgcaacgtcctggggtgggtgaaaaaccgtggtgaaaactgaaaaccccgtgcaccgaattttaccggcggctttccttgcttccatacgaagtctgatgactcggagaaacggtgaggacttggcaacagtgacatccactacaccggcattgtcgtccgctgatttggaccgctgtcccggccggcctcatcagcatcagccgaacccaacccacctttattcccataccgctcacacgcaacagctgaatcattccccgctagcgacgtggtatattttccccctccctcggcctctgattttatttttgaacttttcaaattcttaattttaaaataaacattttcaagatttaaacttttggccatgtcaggcaagctggcttgaccaaaagattcagatttaagaaataagttttagaatagtttgtttgtaaaaataacaaattcaaaataataaaaactctcggtgtctctcctcaccggcgatactcactgctcgcccgaccagcgtgaatggaatggctttttgccgcggtacgccgcgggcggggtccgcctgagattgcggtgacgaaagggaaacgcggccttttgatgccatatgccaccacagtgcgtggtgctcccgtctttttatcaggcgagctcccctgaactgcagctagcggcctaccagcagtgagtcggtcgatggatggatggggcatgataaagcgtgcgttctggtgtctgcactttccactgtttgttatcaatgctgtgcgtcgaccaggaacacaaaaaaatggcacaattagacccatctggggggggggggggcaggaatttgtcagcaagatttgggctcgcaggataaaatctcgcatttcaaactgtacttgtatagaattgcttatgcccattacacacgtaaaatgacaatgggaggggaaatgttactgcaatttgtgagtttcaggtagtactagctgacatcagttacttaatattccttttattctaaaatatattaaccaagacatatctttttttgagaattacacagtaccctacccctgggccggcaaatcctggagagattaacaaagtcactacagacgcctcgctgtcaacgggtacgtcgcctaccacctaccactgaaagcacaacgcagttaaatcctgaaaaattcatttccatgggtacgtcgcctaccactgaaagcacaacgcagttaaatcctgaaaaattcgtttccatggggagtcgaacccaggaccttagatgctactgagacttttgtaaccactaggctacaagccctttcgcaacaaagacgtatcttgatattatgaaaaaaaaaacttgtttagactagtagtgatataatctatctaatatagtattagatcattatattttaaaaagaataaatactattactatgttgtgaatgaaaagctatgttaatttcaggagtttgcaatcagtaccagactaccagtagggatcttgttgcggatcatgcagtgggttagtggcacacaactccacgctactacctcatgacccatgttctatgattgtgctgttgcatgaactgttgtcatgtagccgaacataagcaaatggatggcagcgttgcgtcacgtacctgcggacgcatgcatgccgacctttcgatcatgagacgagcaaccggccggcactgtgtgcacacaagtaggagtaccgctgcacgcgtgcaacacatgcatgcctttttttgtgcttgcaagggaagcctctgacctgaacagcacagctgaacagccctgagctgctgtgcatgctacctcagctcgtttcgagattgtcatattcactgttcggattggtatccggccggttaaggcaccgagttcgtttgatgttcgtttggtagaagatgtggatatataaccggttccaggtttttgtcatttatattttctagtgttccactcaaacatgtaccaaaattaaaattgagttgtacgtatcatgtggtacatgtgttgtcgtcagccttggtttctttaggactccctccgtcctaaattataagacaccatattttcaaagaaaatcaaactcggtatttttgactaataaccatactaatcatttatatgctaaatattatacatattatatcattatatttatattttaaagtatttttatgtgatgttaattttatatttattgggaacataacatggaataaagtatatcattgtttaaaaaaatagtatatgccttataatttgggacggagggagtatataacttctttctgtttttggaaaggtattttgatgggcatttcaattaatgctttcttttaatatccaatacccctcagaatatttttttcctccatatatcacctaaaaagttatcagaaaattttaaaaactttgtaagatcaaaatatcactccataaacataaagtttaaattcataatataagtaaaaacaaaaataagaaacgcgattgcatgtttatggaggggatgccccattgagggttataaaagactttcccaatcattcctttattatgtgtttggttggagggacaagaagggtacggttagagcgaacccatttttcagagtatttgatttaggacatgtgggatgatatgatccctaaaaagaaatattttctctagatccgggtcaattccatacttaaaaaactggtagaccaatccaactcactttctctttctcattgacacgtagaccacatcatcccattctcaagaaatagtaccgttccacctctcatgcaaattaaacatatatgtggaaccatcccatcaaaacacaaagatgggttagattcgttccatctcattactaaaccaaacacacgctctagacaatacagggatcatcaacaggccggcacgctagattagctagggtgatccaagaagcaaatccgagcgtttagaactgaagacggtgttgcaagatgcaacgaaagtttttcggtggtggggaaagaacacaacactgtatattgctataaacgttaaaggcggcaataaggtagtcgatgcgtcaaagggaggtggtgtgcaggtcaaggatggaggcatgaggtagggagattacagcaaagcctcatcaacactgtactttgagaaagggaggttaattagggacttagggttaaagaaaggagggaggtggactattggatctgtatcgaatggtccaggattaggtatgctcgtatgcacattctataacgtttttctttatttcttttttggtgcggggtaaccgtataacgtcattaatttgatagtggattaattaaaagttatcaagactagaaaaatgcctttgtgttgtaacggatgaaaactattttaatcatgagctgtaattctgatcgtctcaatttagcatgcgagtttatatatatatatatatatatatatatatatatatatatatatatatatatagtaaatttgtttggtgctccatggtgcccgggcaccattgttgaaattgagtatatacccaattcaaatgagtatgaatctttttcaattacttaggtattaactatatatgggggcaccatggtgcccgggcaccatgatatcaaatacacaaaatcactcaaatttttcaaaattttcaaattgtgagtatatacctagttataataactcgattcatacctatacctatcaacaaaacaactcaaatttaactttatttcacaatccatgattacatacctaactaattatatgtatggatgctatatacctagaatcaaaatctaacaaaaacaagttcaaattcagttcaaacttgctttgaactagttagtaaagtagctaatgttaatatctaagtaattgaaaaagtttcatactcatttgaattaggtatatactcaattttaacaatggtgcccgggcaccatggagcaccaaacaaatttactatatatatatatatatatatatatatatatatatatatatatatgagtctcgtatttccaaaagcgaacgaacttaaaaaccgactcatacacagatgacgtactaaagtacggcaaaaacatcttcaatttttataatagtaatttcaaaagcaaacgaacttacaaaccgactcatacacagatgatgtaccaaactaccgacaaaaacatctttaatttttataatagtaaagataaagatatatatacttcctcagtcaaaaaaataaacatagtataaaatatggcatatctttagtattatgaatttaagatatttagatttgtttattttagaactgagaaagtaggtttctaacattctgttgccggccgcttacatgcatgcgtatggtgatgattgattcgtctcttacagctgagcacggaaaacagtattgcctattaatgcgaaatatttgttaaaaaaacttaaaaaataaactaaaatgattttttaagagcaacttttttatattaactttcgcaaaaaaaaaaattgcacattagctacttactagtaacacaaatgtacactagctgcgcattatcatatacaagtgatcgaccaacgcatgcacgcttgtatgcaatacgaacaataaatattacaattaataggcaacggccatgacttaatctcgcttggcctggcacagtattaatcaaggtataatgagcagcgggggtgtgtaactgatggtaatataattaatataacaaacgttatttctcagcacagtaacttatccagtgtggtgtatatatatatagttcatcatttcaagtactcccagacacagtgccaatcggacggcatagatactacagggaatatgcatgatccattttcttagctttcttatttatgaaatacttaaatatgtcatctagcttgattatgcttaatggatgaatggattaacggtaatgctttttgaacttttgaacgatgtaatttttgtaaaatatttcataaatttcttagagaactttataaaaatcaatctttcaattttataatagttaattcattcgtttctactcttgaataattatcacaaatcatttatctattcaaccattcagcacaaaagaacaaaaatatgccacggaaaaacaatgctaaaaataatagaagtacattgtagatttctaatggccacaagaaataacttgtgtgaatattagatcataaatattgagacgatcgataatgagaaataaagggaaagaggagatagcattatatagttgcatgtgccttatattgtgaaattaataaagtgaaaaaactatgtaatatatatgatttttttttcagtggagtacgcaccaatcatcaatttttatgctacctataaattaagtatcttacaccataaaaatcaatatcattttttggcaaaaatatgacaaagtactttaatttgcctcttttttttacttcatattataaattagaatcgtcagactgctgctcaaaactatccagaatgtaaaatggagatatgaaaactataatactcctacttatttttacttatggatgaaaaagcattcacaatgctattattttactaatcgaacctaggtggaagggacatactcccccctaatataagagattttgatattttgcttatattgtttgaccattcgtcttattaaaaaaattaaaattattatttatttttggaacctttattttttgtgacttactttattatcctaagtactttaagcacaacttttcgttttttatatttgcacaatttttttttgaataagatgagtggtcaaacagtgcaagcaaaatgtcaaaatctcttatattatgggacggagggattataatttaaagactactggtgtaatacttgtcgaccaaataaaaatactttcacaacattacaaatttatctatttacattaaaataaagttatcaggaacataaaattatgtgattttcatcctgactatattgaaaagccgacactgtcaaatcaaaatgagtagagaggacaggaaagaataataccaattttttagtcaataatgtaataatactatgtattatattattctaagagttagaaaagctagcattgaggtggctagagttttttctttttagagggtggttcgaagtttcaggtaatttgacattatctaaaatcgtaattaagcaaagtaacctaattgaaactctctacaatatctgtttttagaatgaaggatttctttttcaggattcactaaatgaagtgaaaacacctgtaaaatttcaacgtttttttcacccttttggatcgatcagagagtacgtcatggttacgatagctagatgcattgtagtacaccactagcatactaaacgtgaagcatgggtgaatgcatggtggtctgctatggctaggactgtaggacatggttgcacttgcacacacacccaaatgtagcatatcttatcttccttaatgagtgtagtgctacaagtagcagcacactaatttattaggacggccaaaatgcaaccacaaggtggactggtagtattcggcagccccgcatccctaggagaatgttttcccgggccctccaaagaatggtgctaattgcatggctaaaatattatcaatattttcaattcctagctagcgccgtacatccaggtagaagaagctacacatggccgcgttcgtatgtacatgggcatagtgaagcggtgaaagaatcattaggtatagtatatggcaactttctggtatgggcagttgaacttgcatccggggaaaaaaatctagagtaaaaaaagcccagcatgcactcgttgtaaacttgacaaaagagagatctcaagatacagtatgagtgcaattgtgcaaaggcagggtgcaagcatgatgatggtgatgaagagttagaggagtacctatatatagctttttggcccagaaaaataaatatatcatggtttgtaataggatagtacaaatgaccatgccgtgcactaaaacagatggcctaacatatgataatagtaccatgtggatggaaggtgagagaaagagagaaagttaaagtaggggcgtctgtcatacatactcgcgccatgccggcccttcttccctcctctcctcctagctcccactagtggctttcatggctggaagattcttgcctctgggatgatgatgatgatgagagacgattcgacatctcagagagtagctaagcctacctgccacaagaaaatagtatagcacagagtgcgagcgagcgatcgagatgacagatcggtatatatacaaatcagcatttgcatgcaggagaacataataaaaggatggcaaatataatcaatatattaatgtaggagtagttgtaaacgacagtaaattaataggagtattattacaagctgttcctcaaagttactatcatggtgtataaatgaacttactgaagccaccataaaaaatgactgttgctaggtgcccctctaacagagagcattgtatgctaaagcaccaggcccctcagtgatctatgtgagcttggtttaggacgcatatattgaactatgcaccgagttaactggaggtatatcaatgtggtttctgacgacacaagtggccattaattctgtatctctaattccccatcgattgaaatttctaacatgtcacctgtgcctgcatctgcaagatgcatgccatgcaaaaccaacacaagaatttggccaatcaatcggacatatgcaactaaccaacatgttgtttgttcagactacatacagtaactcaaacggcgtacgtaccgtccgtggacacacacacagccatcaaaactaaaaaaatgataagagtatcatgcttcagtgcagattctacatgacatgattaaatcacaaaatgagagattgattggtgaatagatcagcagctgtataatatcaccaagttcaccacccttaaaaatctgtgtatcctgctgtgttagccagcccccaagccgataattaaccacacacacatgaacaaacaacaaagaagcaacaccatgaaaccgaaaaaccaaacaaagcaaagagaaacaaaacgccatatgtaacactaatcaccacaggcttattaaccccccttgtctctatctcgtttctctatctccacatgctgctagctgctgaccaccacgcgtgcatgcatgagccatgcatggcggcggcgggcaagcagtagcagctcgcaccaccttaccaagaaccgccgccgccgccgccattgctgctgccgttgccgatcatgctgctattccagaaccctggggcctcatggccaccgatgacgccgccgccaccaccttggttcttgccgtggtcgtactgatgatcgccgccgctgttcgcgtcgccagccgcggcgctcaccaccggcttcaggtcctcgaaggggaacagcaacctgcccgccgcgctctcttgcaacccagcgctgcacgcgccgaacaccccggagccgccgcctgcacccgcgccgtgcgtgtccagggagaaaccgagcacggtctgagcttgttgctgctgctgctgctgtggcggcggtggcatgcggaactcgccgagatggaaccccgcagctgcgtactccgccggcatccctagcggcgccatctgcggcagcggaacgtagcagccggtgctcctcagcaactccatcgccgagaacgcgcccacgctgcccctgccaccggcgccgttcgccgccgccaggttgcctccggggttgcacacgctgctgctctccaagctcgggaacgccgtgaactccggcggctgcagggcgcggccgtggtggtgcgggaacgctaggttgaggtcctgcgctccctcgtgcatcagcttcgggttcttggccgccagccccacggggaccgagccggacaccgccgcggaggtggaggccgacgcggccgccgacggcaccaccgaggacgacgagcgcttgttcttccgtgagccgccgccgacggggacgttgcggagcgagccgccctccgtccagtagcggcggcacgtcttgcagaagtagcgcggctgctggaggctgtagttgttgtagtagcagaacttggtgttcgtcgagttgcaccgcgggcagttgagcgccttctccttctgcggccgcgcgcggcgctccgtgccagccccagctccggcggcgcccgcgccggcggccgctccagccgccggtggggcgataggccgctgggcgctggccgccgaggacggcggtggcggtggctgatttgagctcccattaggatttggatttgcacccatcagcatctcttccatgggcttcactagccctagcccctggtgattgacacatgtcgttgcactccattagatgttgcaattgcaagtatcaacacaaacctagaactaagttatgcaatactagacaattagcaagaaccaagaagcaagaacatgtagtatatgagagacgaatgggggaagatgaatgagcatgaggtgtgatgtgagctaggatccttatggtgcaacaaagaaccaagcaaatggatacaaagcgagattaaagctagaagagggaaaggtgaaagatagaaataaagcgggaaaaaaaaagcaaagtaaagatgagagagaaaacacaccaccacacaaaacacacaactttgtttgtgctcttgtagggttgtgtttgtggcgtagcagtactgctgctgctgctactacatcatcctccaagacatggctactcttttgatgcaaggtgtgggcttgaggagagagacgaaagggtgaggggtggagagaaaagccatgaggaaaagagagatgaaaagataaaaaggaaagggaggataagaaagaaagcgaggaacaaaggaaaagaaaagcggtgcgtcgtgtgctcctttcaaggattaaaaggggaaggagaggagggagcaagagaattaaaaggccccaaacaacaacaacaagagccctcagctcgaagccaatggagaagacagaaactaacccacatacacacagagcgagaagaatatggccgatccgtgcatagatctgcacaaagaataaaaggttggccatggcggttcccaagagcaaacaaagccgagagagaatagagatcaccgtatcccaccagaggaaaagcaagcgccaagatcaaggcacaggcagattaaacaagaaggatcgaccaagaaacacccacatcaacaagatccagaagaagagcagaagccaaaatcgacccggccgggcccccggtgagagatcttaattgtagacatgtcgccggtgttgcatgcaccgattcgagaaaggatcgagcgcagatcagccgccgcagcttaattacctgatgccagtgggccgcatccatgcaagaagaatcccaattgctcgatcctcgccaacgatttctcgctatcaacacaaggagaagagagagaggcaaggaggatgaggagctcctggatgtctcgagtagctagctgcaggcacgagtcaaggagaggaggaatgtcttgtggatggcctcaattgaattgctctccctttctatctctctctcttctcatatgtcatgagatagtgggattcttttcccaatatttttatgtctcttggagaggagaggagagaggacggatgtgagggaggaggaacagcaagggaaattggtgcagcagcgtgctgtgcttgcctccgtttttggttgtaaattttttgttctggctggctggttgagtgtgccgccacctgcgtgcgtgggccgttcgcaaaaccagtcggtgggagtagtcaacctagcgaaggaagccgcaggcccgcagccgcgcaggcagggggagagaggcgcgcagccctacgaatgatggtccgtggggccgtgcacgtgcgtaggacgacgcgccacgtgcgagccaaaccaaccagggtgtttttagcgcttagcagtatgaagctgcgtatagatacttgaggaggggtacagatcagctctcaacagcaacgggcaggatcaaattcattgcgcttttaaatatgacttggctcatcagtgctacctgcttttaggtgaagtgattacatgatgttcggaactatgtcaaggaaatttttaagagggaccagctgactttcctaggtaattttacacgaagctgtagaattagagttgatatacaactctgagcttttgtttccatatagtatgtgtttgtgttttgtatacaatcgatttataaaaaacagaattagatttgatgtacaactattggaatctattttcacaaatgagatacaacgtatttcatatatgaatgactgtagagatcattagacatgaatatatgatgtacaactcttactatatcgatcagtctacaccatagcattcctacttaaatcgataataggtcgatagttggacatcatacacacttgcaaatataagctgcaatccactgttactatgtatttactctatcaaatacgggttgctatacctcatagttccgttagaacggtatgataccaatcaacagcaggtataagattctgatacctcatcgacactagccaatagtcgtcgatattagatccgataccccatcattatcacttgatagttgtcgagatcagatctagaacccatagtaatagctgatacttgttggtactagctgatacttgttggtactagccgatactgcatcggtatcatatcgataccttctaataccagataaggtaccagagtatcaattcgtaatatttatatgtttcgatttcattagcatcgcccttcctttatcgatggaggtggccactacctccttcgatggagacagccgcttcaacccctatcctctcttggcgatgacggtgatgatggtctccccacgacaacgactacgttgccactctcctatcctccatcggcacagtccttccatcctctcgatgcgatggctgaggtttctctcatcctcctagtcatcgtgacagtggcttcggtgatcctcgcccttcctaggcaagaggaggagtaggaggaggcgacactacaggcgataagcagctaatcaactagatcaagtggtggtttgcgcatgcctcccggcgtatggggggcagacccggtccacaccttggaacgggatctccgtctatagcattttcgttatcaatttttgcctatataccgaatggacattcagataaaaaaattgcatgtaaaaaatagtaaataaatatgaaaatataggcttgtcattaattctatatttcaatcttataaagttaatgaaatattaaaaatcaagatatcaatatattgaaacttcacattatcaaacatagaatttatgaactattaagtaatgaaaatatttgtaggaaaaaaatgaaactactaagattgagacccatacacaatgcaactttgatcttagtaattcccaaatctatatattgtttgattgatcgtaaactaaattaagacttcacagccactccaaatttgtattattactaattacgattttggtattattatattaagaaaaaaaaattaatgagaaaagtcttagaattgattgtatatataaaccgcatgcgcgcggtttctagttatcaattggtaaagaatttttatgatattttttagttggtgtgtagaaaacttgtatacataatatatgtttccatgtaagtagaccaatgactaatggtaacaatgaaacctccacttggcttagtgctgtaaaactagttttgacaaagatccaaattttctcaccaagcagaacctactagccaaccaattaactagttcggccatgtaataccaactgggtgtgttcgagagaaaagataaaaggaaaatcaagaaatacgcaaaacgatgtgacatgagcgtatgattagttgactgttaattattttaaaaaaagattaatatattattaaaataactttttctatataattttttttgaaaaaacacaatatttagtagtttggatagtgcgtgcgcggaaaacgaggttccttacttgtcactaacacaaaaacaccacgtatgtctactattagttgggagagaagtaataggtttgagtgggttagtgggtggaaacaggtggacatgcgaaaacgaaactagtagcagaatgagccgggagtccggcggtgaattctcgtggtaccggtacgtatggtcgatgtccgttgtagtcgcgcacgatgtatatacggacgggaaatcccgttgctaacttgctacaggttttaatttgcacgccctagctttggtgatgggtgatgtggccgacgcgtccgcgtccgcctccggtcaatccacttccgccacacgctgacccccttacgcgcgccagccaatgcgatcgatcgaagcctcccgggcgtctcggccagggccccgccccggcgaatgcacccatccatccgcatccgcgcgagccaacggcgcgacgccaccgcacaccacacccccaaccccaccgtaccacaccacacgcggtgccgtgccacgttggtggtggtggcgagagatcgcactcggcgcgcgggaagggcgggagggatcgatcgaaaccgatcggtggatcgatgggagagccagatcgagccgcccgcgcgtgggaaggggacccgctcgctccgacaagggctaaagcggccgcgcacgtctgcgggggcggtggcagcccaccccccctgcctgccgcggcggtgagggcctcgcgccatctcacgatatcgctatcgctatcgctagtgcgcgcggatggggtgggagctgctcctcctgctcctgccgcccccgcgcgcatagtccaacggtgaatgtgcgtgcgtgtgcgcctgctagtgggtacgtaccattattgttgttcggctgccaccggcgaatggatccatcgaaattccttcgccgtgtccccattcacccacgacagcctgccgggtgcagctaatatacctagtactgtagctcgtatagctgctagtaccaccacttcccaattaatttggctgctcggatggagctttgcaggcaggagggagtaataactttggtatactactcgcaaccgagtctgttttggctaggtgacaatttttattttggagaaaggcgaaaggggaagaagcggcggcagcaacaacagatggaagagctaaagacacgaaaagaaaacgagcttttctttctttctgaactcaacaacgagcttttgttggatgatatcggttttgtcccctttttattaccttttcgctgtcttttctgcgaattcgtccacagttgatcgcttccggccgtgatagccctttttgagaccttcgcttcgtgtgagcttttgtcagtagcgtccaaaagaaacgattcatcaaaacagaagactctgcaaagtagtaattagaagcggtccgtgacaaggtagtacgagggcgtactaatctctcgctgatcaaacaaattccccttttcctcccccaaaggcagaagacgagtagaaaccaccttttgagaatgatcacaacttccctcgagaccttaattagtcgcaaaggtggtgacaactgacaagtatgaagggaataaaggtgccggcgattacgcgttcgctttgagcgattagcacccgtttagctaagcagataagattaaaccagtttgttatgatgacttgtgctaatatatttgtttacgaaggtcggttctactcctttctctttatgcctaggacagtaggagtagtatatttgtcacgtcgattaagtagtccttactttgctcggttgaattttcctctacgtggcccttttatacgtgactaatataaaacgcgaataactttgcccaacgaaactaaacatctgcccccactatccatccatcttctcacgctcataaagtcacaagctcattcagcgcacacatcgcagccatcattgttcatacccggatgatcacctgatttattgctatcgctgatggtactcgacttatctacgtactgatccagaagtggtagggggtaggcgcaggatagcaagcgagtgccacaaaacatttgccacaccacaatgcggcagctcatgcaggatggtcatgtcaggtcagatggcgcgcacacgtactgaatttcggggaagggagagagcagacaagcaggcaggcactgacacccactatgtgccgtgacagatcgagcgagctagccatgcatctttacggatttaggctgtgtttgtgggagataggattgggaagatcgggaagagacgcaaaacgagttgagtcattagcgtatgattaattaagtattaactattttaaactttaaaaatgaattaatatgatttttttaaacaacttttatatagaatttttttacaaaaaacacaccgtttagtagtttgaaaagcgtgcgcgtgaaaaacgagggacaatctccctatctccactgaacgaacgcagccttaatgaagctgccgtctcctcagccaaaagccgaaaaagctctcgatcgatcgatcgatcgcgctaggactagctaggccggagcacgggtttctgctccgtcgcgtcgtccggctagctcgtatagctatcatcgcgccccgaccgaccggtcgaaagtgggctactgctataccgcctgctgcttgcttgctgcgcgcggtaggtgcgtgctgctccgtgtccgccgcgagcgagagcttcctccactcggcggatggagtagcttcgcatgcgcgccactgtgctgttgtctcaggcacatgtgatgtgcaccaccgatccactacccagcaccctgcagcgcaggcatcagaacaagcggacgtacggattcacggcaagccttcgagcttggccgacctaggctctcatggggttttgagctacgaggaaatttgatacagcatagtataaggaccccctttgaatcgaaggaaaaaccacaggaattctagaggattttatcctatgaaaaataatccaatagagtcatttgaaacaaatgattgttttctattaattcctttgaaattcctatgaaatgaaccttactagagcaattttggaggaaaataagcatgaggtctcacttcatgttttcctcttcatgtgtctaaggtttctgcgtttttcctatgtgctaatcaaacgacgacagtttgaagacttttctgtgtttcaaaatcccataggaatccaataaatgtggcattcaattcctatatttttcctattcctctgttttctcaatcctgcgattcaaaggggccctaaatgattttaaaagaatgttataaatcctaacatatttaaattcgtactactaacatgtgtgacattcattcaaataaatctcttatattatggatagagggagtacacaacacagcaaaagtttatggtatttgtaacacctcacttaaaaacatcatcatacaagaaagaaaattttaccataaagtcaaatgcttatagccaccttagacgcccttattgctgccccaaattctagggccttgaagagaggatgagagaggatgggaggaggaagagtagtttggttttggttcaggacagacctagtcgcaagcgggatagaattatctttttcacgtggtatttttttcatttgaaataaaaaataataaatggcagtagtgcccacgtctagttattaatattttctccaacaaccatgtcatgtgttttgggtctcctgtgacaagatcgaccataaattttggatgtattttgtcttaaagttacggagtctcataacacggcactgctactcctacctcctagttgatgagtctactctaaatgtacatgattattataccatttaccggacttgatttgcaacgatcaggctttacgctatgttattttaattattcattagattattgaaacagattatttcttctatgtttttttcaaaaatgttttctcaaaataatacttttttgtaaacaattatttaattttatttatcaaaatattataatttatccctataaccaggtagagaattcatgaatgtaatccacttaatctaaatcaaacggacataaagtatagttcttttcccttttcgacgatgaccaatttcagtattctattgtcaaaccctattttacacggcctattattatttataggatgacttttttgaagtttgatacatttaaactaaggctgtgtttaattagttcgtgtgcgaaatttttttgaagtatacggacacacatttgaagtattaaatatagactaataacaaaacgaattacagatttcgcatgtaaactgcgagacgaaattattaagcctaattaatccgtcattatcaaatgtttactgtagcatcacattgtcaaaccatggcgtaattaggctcaaaagattcgtctcgtgatttacatgcaaactgtgcaattggtttttttcattcacatttaatgcttcatgcatgtgtctaaacatttgatgtgacggaaaaattggaagtttaagaaaaacttttaaatctaaacacagcctaaagagttcacctgtgtttccaatgctttggattatttaacatggattctcaatacaatctacgattttatatattttgattaattaatactggtggattgtcccggctactttggatggggttatgataaatagaattggatttggtatacaactcttttgattcataaatataactgtaatatacatcaagtcaaattggattttatatgcaaccatagtatatattttaattgatacaattctatttttatatagtagtttttaatagtatggttggatttcatataaaactcttaacttctatttcatagattttgtgctaccttatcaattgatctacacctctatagttaaatatatcatgatcggatggttaatatgtttctcttttgataactggcttaaagtctgtgtgttgcaatggaaaacaaacacacaacggaaaataaattgaatttctagcttattaaataaatcgttatgcgcttatttagtccaagtaatactatattttttcttatttaacaagtagatgattttgaaaattagaggagccaatagtaagtggtgtaatagtatatgtcagtggtagtggtaggttggtgtggaaatggataccaccactacgaattaacatttttaagtagtatagaatatgagaactatacttagagcgaacgcattgcctcctttaattcctaactatctttataaaaataatctagctagataggtatataagcttctcaattgtgcaattataacgtattaacgcgcgtggccataatatgatcgacataaacagtcggatactaacatggaagttttctattaagtgaccgattcatatatgcatttacttttatgtataactaggaaggtagccacgcgttcgcgcgggcatgcgtcgtacgctaagtttgaggtatttataaaagcgatatattaacaggagaacatctgccacgatttctccataaattatttttgtcagcattaattaattatttaataatattttaacctattagatttatattatatcaaatataagtaatatcaataagtaattatttataatcttcttcatcatttaaaaagaaggtagatttattttctttagaaaacatgtcaacgaaagtaaaagtaagtgtaaaaaaaattaaggtgtttttattttttatttgtataatatattatcataatatgttaaaggatgaattgggtgggacattaagctacacgaaaaatgcacgagtttatatagcctaatatgattgatatattttgagaggtgatctacctatgaacatttcatgtagagtgaatgagaggctccacgcaacctagcaggaatacaataacgacaaaatatcattgcataataatatttttggaatgtcatgtaccatgaataaacacttgttataaataatggttctaccggtttaaaaggtataggagcagacatgcatgttatgcagtgagccagacagaggttctgatagactttgttttttttaccaaaagatagatatgatggtataaaaattgggtccatcggtttaagtggaaaccgatggtcgattatatgagagtttttgtaattaatagaatgccacataacaacatagaagtgtttataggagtggtaggagcaatcatatgtatgatttagatgctatgatcattttaagatcgtttatttatcttttaaaattaaaatatcatttatttacaaaagcatcaagatcaattcgtatatctaaatagcccccacgtgtatgttgtgagaaattaatgaagttttttatgaagaaattaattaagttggtagaaagtcattagatgtctaacaatgtatttttaatgggtttaacagtttcattaaaaaataagctagcatatttttattttcaatgacaaattttagtattttcttttatttagtggagcactcaagatggatgtgggtctagaatgcaataaatccaatatagatattaaaattttatatttatttgaaaaataaaaatagatatataatttatggtacaaataattgtaaagactcgtaaaattaatccggcctttattaaaaagtctaaaatagcacgtttaagtataaattagttaatatatttctttgttagtttaatgcgtacagaatgtagcggtataaactttataaactttatgctccacataaagggttcacatatacctttatttaatgggtaaaaataaagggtaaactttattaatttgaaaataatgctccacataaagggttcacgtatacctttatttaatgggtaaaaatatagtagtgtaaactttattttgaaaaaagatatatcataatataattatataagttatgattatataaaatttaactagattatatatatatgaaaagaaaaaggagggaaggagatggaaccgtaagtacgtacgtacctacggatggtgtggaattgtacgttttaagatcaatctagctaatctgacggtttctaatagtggacccactattttaagtaaaaatcaacgaatagatgtttttttttctcagaatttctttgatttctctaatttattagagcgttaagtggcggcttaggaggtttgtaggaagattaatggacttttagtatataatagattagcattttgattattccagatagaatgtaagtatgtgtacaatattcacaaaatccagtgtgtttttccagaatggttattgacaacctttaattaaacatacacaactattaaccatttgttttgtctgtatggcaagggaattagccagcgttagatcccactttagctaaaagtataggagacccactttcggactagcttagtcgagctatattattaattctttaacttcacttatagttgatgattgcaaatatagtactctgaacctgatcgatctatccatcctgaaattaattaattgtgtgacttctgatttaacccggccacacatatgactttattttaagtatcatgtccttggatacaactagccttcaactttggagtttggacaagaagatattgctgcctttatcttacgtcaattaacagcctgtggctcgttcctcgacatggatgtggtggttttaccgtatccggtttttaggttggagtgccacttctgacttaagcttgtgatttgtagcctagtgcccaagtcaacctgcatgcatatataggagcattcctcatgggacgtgttgcatgttaggtggaaatggtgggatggaccacaaaaccagctgaagttgcccaccgccctttccacaaaggtgaaattgtccaaacacataggtctcccttgaaattgtcctttcgagttgtttttgtctttggccggtggacatgtaccatctttgtatttttgacatgtacatttggcaatattatgctgcattgctataccgaactcaatacaacattaattcaagaatgctagctacatattcacacatcaaagtttgtttctaacagtagatagaactactagatattttagattcaagaacatggtgaagcatgaagcattttgcaacgcccgaggcagagatggcgggaaacggccggagcccggagggaagcgcctacatcctcaccctgaagcggcaacggtttggaggaagatattagtggcagtggatacaaggtcgagagaattggtgacagagactagcaaagggtcagccgacggcggctacgtcgaagcctggcggagattgggctgttgggcaaacaagctaagaggatatccccaatagtgttcgtggagattagcaacatgagaggagccatcatggaggaacggcgtggaggccatgctcgaacaagatgactgctggtgagtcaatcgcccagaggtagagtgacaagccgtcgacggaggtgtggcggtatagagagggtgtcaacggcgcgtactagattatagtcggttggtggagccagcggagtggacgggacaacagaccatggcggagtcctgccgataaagataatgcccttagtgggcagcggctgtgcagatccggtgaagtttggaagagagtggacggtgtttaccaaccaactagcgaagatgatcgttgcaaagaggggatgaggaccccgtccccgtcgatagcagtgctaggagatcaggcagggccaggggcggagccacatggtggtccgtgtgggccatggaccacagtaaaatctggcccaagtgccaattacccctgttctggtccaaacatagaaaagaatgatgcttttatttcattagttgatttgccttatcgatttgtcgttccagcttccgtccttcccagttcccatcctaactacgccattgatcgtgcgagtgcttctttcgtaactcgacgactcaacgcttgggattggggacctgtgtccaacagcggcaactggcgtttggcgaccaggatcaagagcagcgttcagcaagtagctatgtcaccatgtcagtttcggttcgattttgggaattccaattagaattggattgataaattaaagcaatgcataatcctattgtagatttgttgaagcagttctatgcttgtatgttaacatttatagtgttcagaaaaattatgttaagttagaccaccctaacctaaaatcctagctacgccactaggcggtgctgacctcagccccaagcagtgctggtatggaggaagcccagaccccggtgcgggaataagtacgctggagatgactagaactgcattatcatagggagctgagcatgaatctttatgtacatccaatggtcacgaattctactatacatttgtaaatatcttaaaacatcagtgattgtttagcaaaaccataaatatgaaactgttaatagtgaggactgcacatagcacagtcgattaggcaccggggcgtgcagtaggccaatcgtggtttcaatccacggggtcatctcatgaacctcacctaagaaggtatccactctttgccattgccaggactaactttttggttagttctgattaggtaaggaacacatgtgtgcatgtttagtggattgcatacatgttactggtgcactcaagactagagcctccaatctctttcaagcatgtgcttgggacaagtacacatgttcgcgcgttgttgcacaaatataacgtttgtctatgtacaatttgttataaaaactgaccccgatatagacatcagtagcataacacggaagaacatcatagaagatctaaacttgatgacaatgtgtggcaaaatatttgttttcttttttgttaacgggattcaaccaaaacttatatccccagaacaatacatgattatgtgctctccttcctgatctagtataattatagttgactaaagttgttcatagaactacaattttagtgacaaaattatcgacttggtttaacattagtgacatatttcaattagctacaaattatgataaaactggaaccctttaaaatctttttattattgacaaatcagacccccagcttgtagattgaagtgtcatgatgacgtggctcaccgtttcggtaccacgttttgatgggttctatcgcaattgcaattttgtgataatttcaaatattattatttcacagtgagagccccatcgtaacatgaaacagtttgttattgttattgtaatttgacaaattcaatgttaattttcctgtaaaacaagcagtaaaagctccccggaaaaaaaaaggcacataagctactagtgctagcttcgtgctgaagcgtaagaacgagcctgtacaacttaggtcttgtttagattcaaagtttgatcttcaaaagtttaaaattttccgtcacgttgaaatttttctacacacataaacttctaatttttcattacatcgttttaattttttcaaacttttaattttgatgtggaactaaacacacccttatgcgcatagctagcaaagatcggcatcggcccgttacgtgtcgcgatgacgccaacgccagtgtgcacactcagttgcggcgacgacgaaattgtcaccgcgtggtagatggatccgcgaggaaatcccggcgggtccccggtgttgtctaatcccgtggcacctcgacgtggactgcacgcttccaccccggcgaggagtgggttctcgcatcaccacccgcccggccgagtccccgatcgatcgatcgatcgaaatccaaacgcctttctcctcctcctcctcaggctggccaactgccactttcacctcatataattaagtaccatgacgactctgctagctgctgaagctagcctgcacgttgcatcacgcacagatcggagtagtagtactatttttcgtgttattgtcgtcagcttattccccttctcttcttcgtctctcctggaattgtcgctttgctgtttgggtccttgtgaggcggcgacggcgagagaaaaatatgagcatccaggagcaagtgggagaatgagagtaagtggccagaggacaagagtggtttgttttgtcctatcctgcaaaaatagtggttggtcaaacgtgatggtcgagctggaagtcaagtatggtccatgcatggtcaatatttttccaccaaagcgtgttatcttactgaaaatttaccaacgttatgtaaacacaaaacaagtactagtacaagaactgcagctgatggtgcagtgcgtttggatcgaatctttgttctcttttattaattgttgacttcagccaatcgaacaatcacaggtggatcatcttcgatgactaaaaatgttattgggagaatctcactcaggcataaatgtctaacctcaggagtgcggacattgacattttgcaaccctggcgctgaaacagaaaacaaacatcaaaccactagtcctagcctattgtacaactcatcaaatctgaacagaaaataaacgtcaaaaatacaaacatcgagctaggtgatctcattgaacactgttctcaatttcgatataaggtatacagctgccgatcaagatagaacggtcgtaaagtcataatctgctttggtatacgagcgttcttgaaagtcaatgcatacaaagcgcctgcgtcactttcttcccagaacatgtcagctagccagccaagggcgaaacgcgacagtactatccaggacctcgcgaagaatgtactacagggtacagacgaaagtaccaagcgtctgcgactagcttccgcgtacggcatagcacaaaaagctccctcgcttggttgacagggaagttatttggaagtttgaacaaaagttgatcagtactaatcgtatcatcattaacatgcttttgagcaagcaaataaggtcatggcgcatgcatcagtgcatgaccctgatgacaaaacgatggctagcttcaacgatacgatacgctggttgccttttggtcgggacacaaatttgctccaatgtacctcgtgttcatgtccatgacattgcatatgttcaccttttttttttaagttgcgttctttatcacctcttcccaatttctactcactcaattttccacgtgcacgttttccatacagctaaatgatgtatttttttaaaaaaaatcctatatgaaagttgtttattttaaaaaaacatattaatcatttttttcaagtttatattaattaatagttaattaatcatgcattatggataactacgttttgcatgcgaggaggtgaagttcccaaccttcacttctaaacgcaacctaagactcgctctccttaatactcttcacaaatgtcaaaattacatgttaaaacagtacataactttaaaaatattacatttgaattatagataaaattaaatacatgtgagacatactaaaagaaaagcatcaaactagtggattgcctcatgcaacttttcgcagggctagataataatagaattcaatttgctacataactctcaacttttgatcttataattacgattgtatgtaatttatatactgtagattttatgaattaaattgtatttgatatacaacttttagcatatactagaaaaattgtccgtacgttgcaatgggtgaaggcaataataataataataataataataataataataatattattattattattattattattattattattattattattattattattatatggtttagttaagataacatttactgtgagaatttgcttcgatatgtatatttttagaaaatcatgagatgtagttaggagtttgttcgtcttaggttagcatgcaagtttttttaaagagatttcttatatgactctgtatttctaaaagtgaacgaacttaaaaaactgacacaaatacggatatgtatttccaaaagcgaacgaacttaaaaacttacttatatacgaatgacttaccaaactatcggcaaaaacatcttcaattttataatagtagagattactattgttatatggtttagttaatgtaaaatttaccgtgggaattcgcttggatatatatatttttagaaaatcatgagctgcagttaggagttcattcgtctcaagttagcatgcgagtttctttaaatagatttcttatacgactcattttgtatttctaaaaacaaacgagcttaaaaaaccaactcaaataccaatatgtattttcaaaagcaaacgaacttaaaaaccgacttgtatacggatgacgtaccaaagtattaccaaaaacatcttcaatttttataataaaatagagatttccatatattcagttgtattagatttcttatacaattttaattagctcttgtttacatagatacaatcttattttgtatacagctttattaaccaatttacactattataattcacatctatcaagattagattgttaatatttatctttttctcatgagagtaatatatgatgcctatttttcgagctctcttgataataaactagtagggtggtccatgcatttacgtggctatattactaaagctacaatatcaactcatattatctttatttatatcatcatcgtatttttacacttatataaaagccgcacacatacatcacacgtgctcacctgtgctcctagcacaggctcaaagaaattaatggagaacagcataaatctccaagctcactactacttttttttattgaaaactagcacacccgcacatgtatgatattaccctcacgttttcatcgaacaattaatgctgtgaaattcttaaattagtaactttgctaaattaaaatttgacagtattgtagcatcgataatctgtgaacagcagctgtaatatcacaaccatgaggccggtgatgaaaaaaagtttgtgttttcgcgccaagcttcgaacgtcataattaattgtagccatggtatatattcctttcactaacttctctatttcctctagaagagctctgcccgtgtgcagtttgcaccaatctagcatcgacaaatagaaggcgacgtagaaattcttgtcatgcaacttctgattctcttattgctgcacatatttttatccttaaaccgctagttgggcgacgataaaactgggttgagaggctgaggtggaacgccaagttccaacacgagtcctcgactgtcattttcgcctcctcaccatctccacttcatgttattttatagtaacttagtcttgaggtagtacatcaaagaatgatacggcacatgtcatgatgtcaagactaggtcaaatcaaatcgcccgcaaatctcaccaaacacgcgtaaaatcgtcgtcaaatttcaaatgtatactacgtagctcctttcctatgtataggatacacatcaaaattgtagttaacccatttttagctggtcgatcagcatatattattgacaaaaaaataattgtgcaggatatgtttttttccattaatgcattcaaaatatttttcatatttatggacaaaaaagaacaacaagaggagcattctgaaaagaaagtgtgctatggcaaattatcatgggtcatagcgaatgcttgccacggaaatgccccaattgcttgaagccttgaacaaagtatgaaaatttttagctttaagtaaaaaccgtgaatcggatgcacttctacttagtcctatatatatatatatatatatatatatatatatatatatatatatatatatatatatatatatatatatatatatatataggacactcatatggtgcccgggcaccatggtatctaatgcacaaaatcactcaaatttttcaaaattttcaaattgtgagtatatacctagttataataatttgattcatacctatacttatcaacaaaacaactcaaatttaactttattttacaatccatgattacatacctaacaaattatatgtatggatgctatatacctagaatcaaaatctaacaaaaacaagttcaaattcagttcaaacttgctttaaactagttagtaaagtagttaatgttaatacctaagtaattgaaaaagtttcatactcatttgaattgggtatatactcaatttcaacaatggtgcccgggcaccatagagcaccaaacaaatttaatatatatatatatatacatatatatatatacatatatatatatatatatatatatatatatccatgggtcttctcaacgtatgtactctcgagaagcatttcagaaacttctatcttatgtgcttctagaggctatatggaatatttttggcttgttgccacgatgtggtcttaaaggcagaggaaccatccgttccaagagtgacacaacaatgtataaagcgtacgacatgtaatttctgtttgggagaacacatcttcttttagcccatccgctccttctaattccgtcttctctactctatattctcaaattctcataattttagcgagctatacacagagttcacgtgggaacactactgccaacgcctagagccgtagccagaattttgctaagcctaggataaactaatgtaatttacatactttttcctttatcttacatattgttgccttcatattgccttcattttacataaacgccaaattgggagttggggttccttaagttgaaggtggaacctctttgaacaccctgcctaaatggtaaggaagatctagaaaaagagcttgcagttccttaataatagactcgcacctgacagaaaactatcaaatatataaggttgaatgatgggaaaaagaaagaagaataagcttgaacttgtaaccttatttttcatatagaagaaagaagaggaagagtagcattttgtctttagactaatctgtgtccttagtcctaagctcatcttccctaggctctggagtagggctatagccatagttgttatactcctatttccatcactacctacccccaacacacacacaaaccaagtgaaccttcaaaaggaaaaagttaacagtgtatgaaacattacattttgagcttgccaaattaagaatgcaatgagagggattacatcgtggaagtgaatcaagaggtggatttctcactggatcaaatttgcctaaacttgaagtatgtcaaaatattacaaaccgtatttttttttaggatcgaaacacaagaactaagcctatcagagagggtgaatggtaggaacacaaaaaacgggtcaaaagaaaccatcaatgtggagattatgggtaccccatacccacacgacatgattatccgactgtttataggggataacttatatctatgaaatatgtaacagatcatgacttgggtattacgtttccttgtatattatggaacggcctaaagtcctggtttgacaagattgtaaagtagatttaggaaaccgataccgtattggttaaggtttctatcttgtaatctcgccccccatcctatataaggtgggcaggaggccctctaggggataggagacacaacctgatcgtcagatcaataacacacccggcggattcaaatccccaaacaggagtagggtattatctctcattgagatggcctgaaccagtctaaattcttgtctccgcatccatccacttttaggtctcgtgcgctaccccttttattattaccgaatttatgtttctacagttggcgcgccaggtaggggtgcatcgagtttcccgtcgaaaggtgtgatggaatcaacttgatgagtcgctcgcttcgtcttcgctttgggatcttttttgcttcctcgccgccgacgactacaacaaactctcgctctttgacttggattcaaaccagtcgggagagattcaatttagctaaggaggagatgcaacttccgtatcatcttcatcaacagcatcacgcctcgccaccgatcgatctccctccgatcgcaggaggccacatccacatctcccgccagcatcgtccgcaatgacggcaggccaagctgcagacggtggtcggccttgtcgccatcctctacggcacggacgcctgacctcgccgatctccccgatgcccatgcgcacgcgacccgcgcacgacgcccaagcgcgagcgtcgcctccgtgccatgcatagcttatggctgggagatccaatccttacaccatagaccatggcaacgtggccgaccaatgaggtgaagacacatcatcgccaggctacaggaccatacaacaccttgcaacaggatcttggctaggagtgctctgcacgccttaattttttcatctacacatatacatgtgctttaatctatgattgcttataagattgatttctccttttttacatgtacactcggggaacggcgccgcatgcccggggacttcatcctttgcgtggctgacgcggcccgactacccccgtggcacatgcgtccgaggcatcacgtcgcatgcccgggggcttcaccaaccggcttgctttcaccgtcaccgactggtgttttcgcctatatggttggcggacttcgccgctgtctatgggcatcatcatcgtcttcaccgactggctgcctcatctgccgccaactggtgtcctcgcctacatggctggatggtcacaccaccattgttggcatcaacatcttcaccgaccagccgcctcgttcatcgcaccgactggtgttttcgcctacacggttggttggtcacaccaccgttgtttggcgtctacgtcttcaccgaccggctgcctcgtccgccgccgactggtgtcctcgcctatacggttggttggtcacaccatcgttcatgggcgtccacgtcttcaccgaccggctggccttcaccgccgtcgactggtgtttccacctgcacggctggcctattatgccgccgttgttggtcgtctacgacttcaccgccggcctgcctccatcgccgccgactggtgtcctcgcctatacggttggttggtcacaccactgttcatgggcgtccacgtcttcaccgactggcttgcctttgccgccgccgactggtgtttccgcctgcacggctggcctattatgccgccgttgttgggcgtctatgacttcacctccggcctgcctccgtcgccgccgactggtgtcctcgcctatacggttggttggtcacaccaccgttcatgggagtccacgtcttcaccgaccggcttgcctttaccgccgccgactggtgtctctgcctacacggctggcctattatgccgccgttggtgggcatcttcgctttcaccatcgaccgccttcgtcgccgtcgactggtgtcttcattgttgttgatggacgactttattcccacattggccacctctgccatcaccaaggggaatattacaaagctaagtcatcattaattttctttatatgatatttttcttttcctctgcctcactacatcagctggttcgccgttgactagtgagtcgggggctacagatgttatatcatatttccttaacaatttttataatatttatcttgattgcttgcgacataatctgagtacaaaagtgcctatagagttatggagttctatcttcctatgctttccgtttggtttgtcgatggatagttgcctttgggccaattcctagcacctgagggctcgttggatagatcgagtaacgcaaggtgctaagttttaatcggaagaaatcaaaagcatagagataagataatttattttctgctcttaacaattgcaaaagtacccaagtagtaaactccgatccgtgaaactttgttccattaatgacgaactcatgtcactcgtatgcatgtttgggaagtgcctaggccgactcccggtgcgcgggggctatgactagtcgggcagagtgtttaaaacgtaaggattcatccgctcggggaaatcaaaattgacaagaggagaaatacatattcataaacattttaaaatgtttgaatgttcctcgagtattatatttacatcagatactactcatcctatatgtttgttctgcaggaaccagatccagatatgcataaaaggtattaatggctttaagcttatctcctacgctccaggaatggatcagccagaacataaccaccggcttgcgtcgaagccgccgactggtgtttccgcctgcacggctggcctattatgccggcggtgttgggcgtctacgtcttcaccgtcggcttgcctttgccgccgccgactggtgtctccgcctgcacggctggcctattatgccgccgttgttgggtgtctacgtcttcaccgaccggcttgcctttgccgccgccgactggtatctccgcctcacgactggcctattatgccgtcgtttattgggcgtctacgtcttcaccgaccgacttgccttcaccgccgccgactagtgtctctgcctgcacagctggcctattatgtcgccgttgttgggcgtctccgtcttcatcgccggctcaccttcgctgccgccgactggtgtctccgcctgcacggctggtttattatgccgccgttgtaggacgtctacatcttctccgaccggccatctcgtatgacgccaactggtgctatcgtcttcacggctggccacgtcaccgccaccgcaaataggcgtcatcaccttcaacgcaagctgtctacgtctgctgccgactggtttcttcacttccgtggctgcatgattctgccagtgttgattggccttatcgtcttcaacgccggtcatcttgcctgacgccgactggcttattcgcctccacggctgcgcatcttcgtcatcattgactgacgtcgttgtcatcgccagtttgccttcgccgccgcccatggtgtcttcactttcatggctggcctattttgccactattaaaggacgtcttcgttttcgtcatcattctacttcttctgtcgctgactggttatgccgccgccgactgagcaacttcatcttcattttcttctgcaccggcaaacccaattaccgctacttcgcaagttttgctacttcaccaatcacgacgtctacaagagcttcgacatctcgacatgtacttccatattcgatgcagtgttattctactacaacaagtggttccctaattttcaagatttctattcgaacatcttcaacacgtatcttcactcaagcaatggctactcggcgataagctacagttctcgactctatgttcagttgtttcccaactaaccaaagagtcaggggctacacaaatacaagacttaaaatttgacagatgttatgtcaacatgaagcaatcaattaatcagctaacgagttctatggaatctacttcgggagtcatcagcttcgtcctcgctccaaagcaggcgttctacttcagcaatctcaattattttaccggcaattttggcttcttagcgctgccataatctactccaaaaatctcaagtatcaagttcaagatttaatctacatgttcgggagcttagagttatcaactaatcaactcatatcagattcaatgagttgaacaatagcatatactttcctctaagtgaagcatctgcaacagctatagcaccaagttctactgccatcttcataaatcaagaggcgttgcatcaatcttcatcacacacatgccaacattaagaaaatactcgagcttcgatatcttctcaacagtttgatgggttattgtcactgacctcattaccaacgcctctacttcatcggccttgacgtctacgccgttgctaaggggtgactatgtcttcaccttcagttgcttctgtcatcaccgactttcatcgccgacttgttattttgtcttcacggttggcttactacgcaaccgctgatgggagacctcatcgttatcattgactgctagactgctattgattggatcaacgatatcgtcatcttcatcaacatcctatcaagcctcttcaacatagcctactctactgctaatcatgtctgttgctgcttatcgtcattactttcggttgtgtttgccgtcgccgactattttcttcatcttcatgattgatggatttcgccattgtcattgatgagcatctacgtcttcaccaccggctttcctccgccgccgcccatggtgtcttcgctttcacggctggcttattatgcctttactgatgggcgtcttcgtcttcttcaccggctgtctcatctgttattgactgattatttcactgccatggttgcacaattcagtcgctgttactaggcgcattcgtcttcactgctagctgacttgtctgccgctgattggtttcttcacctccatggctatgcgacttcattacctttgattggtgtcattgtctttttcaccaccaacatcttcgtcagccttgatgggtgatatcatcttcatgttggtcatttcatctccatgtcgactgcatcagctattgccaatggacaattttgactatgacagaaggacaagctatatatgctcagggacttatcaactcaaacacaaggatcatacatgcaagttggattttgttctagatacaggtaacatgcacttgtagtcctgagattattttctatactcgaagactggactaatcattattctccgtaagggctatcaaccgaatacttgcgccagtcgggattcaatttttatatctattttggagtatcccataagggataatcactcagatcagaagctattcatatgagctacacttggtctatatcacccggaagatttattactcgggagcatattacatgcgtcatactttaaagggtgtcgaaggcatattttttggcctaggcctaatatgtctgcaacccatatttttaggtgtggcctgtcacgttcttttagggacttaggcactttttgcttaggccaaagtgcgcgtgatcaagtgcctaataccttaaaatccttttataccgtagttactcaactttttagaagttggtacaatgcatcttaaaaggtgtcaaaaagtaaagctttatatagctgccccgctgatttttttatatagtcatggcgctgtttgggtttatcaagcaattgattggatacaatatcattgctttttgccacgtaagtgtgcatttttattgaccaatattatggcttaggctgattatatattgtggtcatttttcagacggttggtaaatccttatgagtttatttactcagattttacaccacataggccatatatttccaggtgtggtgaaaccatgtgtcttttagggatttaagcacatatgttaaagcagtgtgcgcatggtgtgtgcccaataccttggaaatttctttattcacaacatacaagcttctttatagctgttttgctatgtgaattttcaatgatgtagtcaactttaggttggatgcatcatgctttacaaagcagtcagtatatcacttagatcatgttattcgggatttcacaccgcatatgctatatattgatatcaagtcacttggttgactataattatcaaaaatcactcagttagttggattatttattccttgactatatgcttggtttgttcaactaaccacatagtcgggggctacacctattagatgcatctactcgatgcacctgaccttatttttcagccctccacagtcttctgatttggtaaaaatactcgggtgtaacaacccagcccagggcttaataggattaatagaatactcatatcaacaagttgcaacttattttccggaagccgatcaataaataactctaaggttaagcgtgcttagcttggagcaatttagtgatgggtgaccgatcgggaagttcttcctgagttcacactagtaaggacaaagtgtgcagaaaagatatgtgttggtctgtgagggctgtctatgacctataaaagctaccatatgtaagcgggcccggcctgggagagatgagggctgtctatgacctataaaagataccatatgtaagcgggcccggcctaggagagacggaacgttacaaagtggtatcagagctgtcgagcatggtgcgcatggctggtgttgatccggagtggtctggtatcagagccgactctcgtggtttcacgggctcgtgtgtcgcagttgcgcaggcatggtgcgcatggctggtgttgatccagagtggtcacacagcatgccacatgcgctggcactggacatacggacgtggccaagaggggacgttcctggcctgggggggttgatcgacgggggcgtcgatctctcttaagggggtgaggacatacggacgtggccaagaggggacgttcctgtcctaggggggttgatcgacgggggcgtcgatctctcttaagggggtggcctagggcttaataggattaatacaatactcatatcaacaagttgcaacttcttttccgaaagccgatcactaaagaactctgaggataagcgtgcttggcctggagcaatttagggatgggtgaccgatcgggaacaaagggagaccatggcaaagatgattgaagcactcggctttagagtaatctatatgtaagcgggcccggcctgggagagacgggacgttacaaagggagaccatggcaaagatgattgaagcactcagctttggagtaatctgatttgagagaagattatcttttcgactgtgaaggtctcaggagctactgtggagattatgggtaccccatacccacacggcatggttatccgactggttataggggataacttatatctatgaaatatgtaacagatcatgacttgggtattacgtttccttgcatattatggaacgacctaaagtcctggtttgataagattgtaaagtagatttagaaaaccgataccatattggttaaggtttctatcttgtaatcttgccccccatcctatataaggtggacaggaggccctctaggggttaagagacacaacctgatcgtcagatcaataacacaccctgcggattcaaatccccaaacaggagtcattgagagggcttgaacctgtctaaattcttgtctccgcatccatccacttttaggtcttgtgcgctacccccttttattattgccgaattcatgtttcgacactcaaacccgatgaagttgctccagtcagaccacctatttaatgtcagtcagatcgcagcttaaccaccggtctaaccacctgtctgcctttggtcagaccacctccctgtcgtcagtccaatctacttcgttgctacctgttgcaccgctcgtcggtctgaccgcaccaccagcatcagtttgaccaccgagatgcagaaaaacacaaattagagaactctctaaaagcatatcaactttattgcttctaattatatttacaaagtgcaatctctcaactttcaaactaaactcaaaatctaggctaaacccttaattttctcaatactactctctcacaaaaaatggatacggagaggtctcaacccctcttctatttataccctgagatggctatgcaaaaccacaaatctaacatggttaagtactcctaatctcttaggaaactcacccttacatgtattaaacttatcctttacaaatttaaacgcaaaacatttcaaacttggactccacatcccatgcatacacatataatccatcttgtatgccataggaatcttcaccactacgtacattgttctctagctttaatatcccacatgatctcctgattgtccaaacatcaacttctcctaagttaactcccgatccattaccggcaatactctcctaagcctcaagatacatctacacatgaataaacaaaaaaccatatgtaagcacaagctatatcctatcttggctcatcattagcatacaatagtataacatagtatagaaatcatatagaaataataaatatgaagtaaacatggtaattcaagaaatcaactcgaaacagactccaatcaagagtatgtcggtcagaccatcggactggtcgttctgaccgtcctcatgcagagagaataaaaccacttcgccaatagatcaccaaacatcaaaaccaatttaagtcaatatgttaattgttcataaaaagtataaatcaaaacattgatttcacatttttaacgtttgtgcaaaatgcggcaagttaaaagctactactccagatccatgcaaaaaaaaaatctactccagaaaaaaggaaaagaaaattaactatataattctcccagaaaataattaagtgcatcttgtgctaagttagtggaccctcggaatatccatagcttgcaaaattcctatttgtttccaagaagaattctaaattaattaattaactatccatgcagtcaaaaccgattagttgtttcttcggtgaataatgctaaacaaatcactaccttaagcgcagccaaaggagacaaacaaaagaagcgtcgccatcgcagcgaattgaaggtgtatacatcaaccaaatctcagtggagtgtggggccatccaggatgcagctagctacctgaccatccagagccggaccagccgcctccttaattccacgctcaaatgatcaccctaattaacacacatttataaagtccaaacacgccaaccaaaagtgtgaggcgtacgctaaaagacagcctatatatgcagcctctacatactacttggcttggtcaggttgatatatggtccatgcatgtgtaattaactatagtacttagtagagattaggagcattgtttcttccatggcgtgctatagctcatgacctgaagaggtcaagcctgacgttgacagcgtttcagtaggtcgcggactcttgctgcatgcagctactataataaacagttcgtcccagtattccaccatgcatgtgattgcctacaaatcttgtctccagtgaaggacccctccaagaaagatgttcaattttcaagccttctcgctggtcattctgctccatacaaaatgatccgatccgatcgcctggatggtatcactgctgtgcgtcctattccagcagtgacttttactgtcaatatgcgtgtcctaaacagtctgaattccgagtagaacacgcatgttaggacaacgctacatgcacatcgatggtgacgattgtactgactagtgagttttacaggttttttcatcaggttggaagggccgttcattatttcatcctcctcctatgtttcaagctaggtttgacttcgagcagattattgagacgacatgatggctgtgtttgtttggacgttttcccatcgcgctacagtgttttgcccccgcgcacgcttttcaaactactacacggtgtacttttttgcaaaaagtttctatacaaaagttgcttaaaaaaatcaaattaatccatttttgaaaaaaaaaattagctaatacttaattaatcacgtgttaatgaaccgttccgttttccgtattactgtagcgcgctgggaaaacatccaaacgaacacagccgataactttgtagtcgctgggggctacccgagtcatgtgatggtcgtctatcctctgatgatagagtttctaacctaaagggtaaggtgctaaccgacaagcaaatgcgtgatgcgatggtcttggagatatctggttaattgcgcccagatcattgattaatccgatcaatgcaaagcaattgggctctttaattcctccatttcttgtagtcttagaggctcatccagtcgtttctagtagtaaaatccaacgaattgtcatgtccactatataatttgtactgcaactgtgtagtagtaggcgctagcagtgcttataactgtataaacagccaaaaagaggccataacggcgcaacgagcactagcaaatctcagggcaccacaatggttatctataaactctctataagagatttatgtcagcatatttttctacttagaagatattaaagagagagagagagcaaatctatctactaacttagagatagtctataaagaaaaacaactcaatacatgagagagctatagatacccatatagacatactattgaggtggtttactattaatctagtctattgctgagaggtacatgttttatagagagcactttactttaccattgcgggtgctttcatgaacacatatacagcaattacgaccttatcttctgtcacagaaattaaccatacaccttacgcgaatgtgcctactctgttgactggtttggcaacacagtggaacctgtaatcctgtacacaaagtcacacattagggggctagctaggcagtttgaacagaggacctagctgcatcaagaaaaggttgagaactagctggtttggacgttaggttcaaatgattaactccgcaaaaacggacacattccaaaagaactgattaacctctccgacgactttcaggcctgatccatcccccactaaccacaagagatcggtgcttttgcacttacactctggagatgttcagatgatcccgtagggaagctctaatcctatattcctcttattcacagttttggtgcatttcgataatgaaatgggagaggaaccctctctttctccaaaaaaaatcacagttctggtgattacgaacctcaccgtcacaagataataactgggcctggagttttggacgaagattgcagccgggagaggaacaagttcatatgaggccccttaacttgtcagcgaatccaatttttattcttcaaccgaaaaacaaaatacaatgggtccctcaactgttaaaaccggtgcaaacaagtcctaaggcggtttggatggcgatttcagttgacgtgacacttacgtggctaatttgactcgattttcatctgacgtggcattgacgtgacacatgaagcaaaacttaacaatttaaaaaataaaacaaaatatgtgggcccacatgtcagttaaataataatattaaaaaatagtaggccccacctcatcccctcagttctctatctcctctcccttttctcccctcctcctatcgtggagtacacgagctgacacgaccaccatcccggggctttgccgctggtgtcggtgccgagggagaaatcgacgaggttggcagcggaagaggatggcagcgtggccggtggtggaggaggacggtggagaaggacggcgccgtggccgccggtagcggaggaggacggcaccatggctcgcggcgacggaggagggaggaggacggcgtcgtggtccacggcctcctgcggcggcgggggaggacggcggcggaggaggacaacaccctgccccgcgacagcggagggggactatgccgtggccctcagactcccgcggcggtgggggactgtggatgcaaaaaacacacactggcatgggagatctgcttaactcctgcgcaggtccaaaatctcgcctttaggttcgtaagcatgccagttgatttgatcctgcaatcaacaagaataaagacaagaaaaagcgcggttaaatccataaacgatagccgatcggctaattgtcaatgaccatatcatttatctttgatgccgatgtcacgtcagaatcgatcggcaatgattaataaataaaataaaactaaatatactcgagcggctgtagatattaacaacatacaatctttactttaatgtatacttaaactaagtgattgggatatatcggtcgccatgccgagacagtataaatcacttaagtcgaaatatatattaaagcaaagattatatagatgtttatagcatagccgatcagatagatctagcatgtatcggctaatactccgataccactttatatcaagatatcgaaacaagcaagatatatcaaataagaaacctaatataactttaaagcaacaagatcttaatataaatggcagattcaattaagcatatgatgttagaatagctaaatcaggtaagatcggctgaaactccgatactatctctattgataatcataacacaagctagatatcacaattatatataaaacttaatagatcgaactcaaccgatgcagcattaagcatgaagataactataagatctaaacaagatgatgaaaccctctgaaagatggtagatatacgatataatctagatcaataacgagagatttaactctatcggctactttctaacagtaaaaactagtcgatggcaagttatatagcgaaactaacaaagattataaagtatatatgataactcgatgaattacattaacaagattagagtgtcataaagatggaagcactaatcccgaaaacgcaaaccgccatgacaagtttacctctagttgaagatcgaatcgatgcagctcaacccgaaagcaagaactcgtcgaaatagaacgaaagtaaaaaggtggcgatgcgctgaaagtgttattgaacatgtgttaattaattacatgggttcaggtcatatttatacccgagatacaaaatatgtccttgccggacacgactcttatctctaacaaactctaagataccataagtctttgcggcagacttttgtccaaacatatctttaaggaaattacataaaatatcctaattaatagatacaattgcctatctgagagctttatccctatcgtggcaatccttgtgaagcacgtcgatcgattctagaaacaatctcgaagccatcttcatcaaaatcggctgtatcatccatcctttgaccgattcaatccagccgatgcctctgcagccgatgcatactctgttcttcgaacctatctccttgctgaatccgcttcgattccaatgtcgaacttggttcataccttaccaaatttggtcattaacagggacgacggcggagatggacggcgctgtggtccgcggcctgccgcggcgacggggaggacggcgtcatggcccacgatggcaaaggaggacggcgtcgtggcccgcggcgacggggaaggacggcgtcgtggcccactgacatgtgggtctcagtatttttttaattctattatttgactgacatgagagtccacatatttgtttttatttctaaattgttaaattttgattcatttgtcacgtcagataaagaccgagtcaaattagccacgtagtcgccacgtcagttgaaaccgccgtcgaaactgctttgggactcattttgcaccggttttaatagttgagggacccgttatatctggttttccggttgaaggacgaaaatcagattcgttgacaagttaagggacaacagatgaacttatttgcaccgtgagaagcagcaggacctgacttacctctacccaaaacttggaatcttccatcgtcatacatgcggacttgtacagcccaaaacttggaatcttctgggccgaagcctcgccgtgggacggccgtgaccgcggatgccactactatgcttggaaagcggtgggctggtggctaccaatagtccaatacggcaacatatcgaggccttgcgggctaacacatccatcacccattccagcccaaaaccttccggcctgatagtctattggcaatccctctatacccggcttggagccgttttgacgctgtgagcggcggcgcagatacgtgcggcatggaaatcagatcgttgttgaattttgcggctaataaagccgttgtgtcttgtgtgtgctctgactaaacagtttggtctcgtctctcgcccgtctccctcgtggcaccatatgcccctcttctcctttactctgtcggtcccctccctctgtactgtgactgtcactttgatgatctgttcctctgtagaccttctcctgtgtacaccagtactcagccgaccctccccgaagatccccttgcttactacatagttcagttcattggctacttgatatgccgttcaaatggtacttcatttcaactttcaagtgatagcatgtggttaagtttttttttttcatttttcttagaaactttgagccttcaatcggctattgctcatgctattgccttaaatttgattgtacagaaggaacaagaaagtagaaacacataaatggaaaaaatagtgaagttgatcgttagatactctgaattaaaacagctgatgtttgcccaaaagttctgttcagaaaactcagaacaaaatgcgaatacggaatatgctactatgctgaaaactcagaagtcaggattttttttttgtttagtacagttcgtatatctctcttcttcatgaaaacaacaaagattctgagcttattttgcagatgcattacttccatactccctccgttcctgaatagtcagcactgttgatcattattgtttcaactttgatcgctcttctttcttttgtagatgcgaatagttcctggatggggcagtaccaaataatgcttcatatggctatatggatgtgcatcaaataattgagagcagctcaacagtggtagctatgctgaacgaaataattcaaattactctgggaacacatatggatatacaacaggacgttggattggagagtgcacaacgtgcatcgccatgaagcttggtcgacgttcttcaagtggaatgttgtattggtatgaagctgagagcctgagatgcacgcctatgaaccaacggagggccttcttccgatttcgtaaaggggtttcacttttctttcactttcacctacacagatgagaagcatttctatcggcttcccaagttcccatcttcattgttggacaaggttattaattgattcagaaggttattgagaatatgaaagccactgtttgcgcagttaatagaccatgtggttcggtgggttggagatattttcagactagattgatcccctgaatcttcagagatgtgacatgggaacaaaaggtgactactatgcaatatctgagtgtcttgtggcgattgatctgtcagtaatcagtaataacctttctgcaacaatcttcgtccatttctgtcattctcatactgttgtttgattttatcaatactagattatttaacgtgttggcctgcgcagtacttgagaggtccaaactaagtggtttttgttataagcgcccacaactatacgcacgttgacgaagcggttagatctccaaccaccatcacatgatcatttcgagagagaaaagaatcgctactctgaactgctgctaatataatgtcttatcatcttccctgcaacattatcaaaccagtgaggacttcacttcagtgttgcaaaacagggtacgctgcctcagaaaacatcagcaacaaattggaaaacatcttggaagagtgcctttgtctagtctgaatattctgaccaaactgatcctggcagaattgtttgctgtgtaaatatcaggcataagttgctggatatgcactcgccaattcaccaactcatcttggaggattgcaattatggactcagaagatgccctttatgcagaacatgatcccattgtttacagcaacttggactctatattgtgttgttcactgttcagtacgtactccatcttcgtgcaactacttgattcaatcagatttttttttaatggaaaatttgcacatctcaatttcatctgtctgtgttatatatattctatgatcgttaataattaatgtgattttacatgataacaatcttatttgtcactctttttcgcgctagagtagcaaagcagcattttgaccagagacaagcagagttttatgaaaaaatatctgcacagtccgataaatatcattcgtaaggagagctaccgcagaagatataaaggcacagtttggataatgaaagcgctagcaccaacccatcacgtgacgtgagcatagctgtacaaacctacaaaacatcaattctactactgagtactcctactgagtactccctcctagattgctatattttgagacggagggagtgcttcatagatacagtaaaaagaaaaaggcagagcaactgcctgaagaaagtatctacatagatcgaaggggatttatccttctatccttgttctaaccatcatctgttcatagttgttcataccccttgaagcaacctataaatcacagaaaaccaaacaagacagatgtgtcaatgcaaatatcatgggtacaagaattttacagtactagaaaattagttagtaactttattttttcacggtagatttgttactccctccgtttcatattataaattattttgactagtagaaaaacaaacacattttcaaaatatgttttatgttagatttaatgaaactaatttggtgtttctaatattactaagttctccataaacttggttgaatttaataaaatttaacttgaaaaaagtcaaaatactatataattggaagtggatttttgtccctcaaggagacatctcctcgttttgtgtatgtcgtttaaaaagttataaaaaattttaaaaaaatttgtcaaggtagatcaatatatgatatatatcttttcgtaaacaagcgagttaaaattcgactaatacaattcgaaacaaaaataataaatttgaccatggattacacattctattcatagtcaaatttattgtttttgtttctacttgtgtaagttgaatttgaatttacatgtttgtaaagtgacatatcatctatcctactaaattttttcaaatgttttaatgactttttaagtgacatgtaaaaatgagggatattctattaagggatgaattgagttttcctagataattaaaattaaggtgttagctggaatcatgcatgtatattagtactaacaacttatgcaaagcaatagattgccacgatcgcattgtcacattattatctctttggtacatgatagatgattactccctccatttcaaaatgtttgacacagttaaatttttagtacgtgcttgaccattcgtcttattcaaaaaatttaaataattattcattcttttcatatcatttgattcattgttaaatatactttcatgtacacatatagttttatatttttcaagagtttttaataagacaaacggtcaaacatatgctaaaaagttaacggtgtcaaatattttaaaacggaggaagtagatgatagttaggtgagagagagggagaaggatcgtgtgggatggcgttctgctctacacaaacctgatcgatggatccctctagcggccgggcgcgtcatccggtgccgcggccgcgggcggcaggacgggaggaaggcgcggcgcggttggactcgacggcgctgtcggggaggggccggtcgagcgagagcgagagctggtgctggccgcagcgacctgcggctgcgggcgccggcggaggcgcgggccggcggcagagcctccgcgacgcccgccgctcgtcgctgacggcgacggcggcgagctcctgctgcacgaaggagagctccatgcggtcgaggaacgccgcgtgctgctcctccgtccacgctccctcgccgcgcgccagcgccgccgccagatcgtccatccggtccacgcgccgagccgaaggcgaggcgcgcgcgcgcgcgggcggacgaaatatctcgcggagtcgcacggacgaaacgaacaccgggcctgcacttggtcgcatcatattatacaaatcggcatggcgttgttgttgcacggggcttggcttggtttggttaaggcgttaagccacggtgaatacgacgcatgcactggcgcagtggcgctagctccatgcagcttcgcggtgaggcgacccgatggacggatcagcgggagatatttttccaggttaggtcagagtcagctcctctctctagggagcaaaagtgcgttgacgctttgctcacttcaccgcatgtatctatctggccctgacacacaaaaggtagcgcgccgtgcagcccatgctgtgctgctgggccaggtcgtatatgatattcggccagttatttcttttctcttgcccaactgtcacgcgcccacgcgcgtaagtattcaacaggacatctatcaattccatggagtatcctcacgtgccgtgtagtgtagttggcggccagcccattgaggaaacctgaaaccgcaagagcaaaaatatctagggcagtcttcaagcgttactataaagattgtttcgatggttggtggcgaaaacaaagagtattagattgtgattgattaaaggcttatttagttgaaggacttgactacacagcaagtggtagttggtttgtctataagaggcactatctacctatactttaaatacaattttctcttaaactactcatccgattacactgttgtgttcgtaacaattaaatctttataacaagatctcacatgattatattttaatgaaaaataataaattacttttataatatatctaaattacttttagatttcactaaattacttcttagacatataaaagtaattcaataaagtctaaaagtaatttacatatattataaaagtaacttataacaaaaagaaagtaactctaattaatacattttttttcattagacgtgactacacagctagtgttaactagtttgtacttcatctagcatctcctttcaacttgaacaatgcaaaagttacttccaattaacattgaagttacttttaaaaattgttaaacttacgtgtgttgatctgtgctgattaaatttaatttctagacaaagtcatatttttatccctgcaacgaatttacttctaatgtcgtgataaagttacttacgttttgttttaagttacttttataatatatgtaaattactttcttattgaatttacttttatatgtctaagaagtaatttagtgaaatctaaaagtaacttatatatatgataaaagtaacttacatatataataaaagtaatttacaaatataaatattttttcatcgtaatataatcatgtaagatcttgttgtgaaatttatttgtaacgaacacaatggtgtaatcggattatagataggataaaaaatttgagagaaaactttgtttgaagagaaaaatgacatgggagagaaaattgtagcctttctctctgtgactctctttgaagcaggaattgcgtgtgcgtgtggttggagatcggacggctctaccagcgtcgcgcgatagcgctaaaacgagagggctctcgaattagattttacgttagttgaatgttacattttgtgtacattttatcacaccaaatgctaagcacgccatgctttttaggtaagtgtttgtcacactgctacagccgtatcttgccacattttagtcttattataacttcaccaaaactttgctatacaagtgtgactaacaatttgataaacacgcattagataaggtttgacaaagaaatgagtctacgataagtgaagccaaaatgtggcaagtcacttacggtagtgaaagaaagattggtcgtttagttggtaaagcgtggcattcaaccatacatgccaatggattaattagatacattccattaaaaatttatcggtttcgaaatatatcattattatttacgtatttgtaatgatgtcactggtacttgtttgtaatctcagtggtgccactaagattcatattttgcatgtattggacgaaaatgccctcatcttctaactctctctctcttccctcatcctttctcctctctctgacccgaatctcatcgaagccggcggtcctcgttgcttcggcatcgtcgttgcccaggactcgtcgggcgagcgcggcgatcaccgtctccatcaccgacagctgccgccgtggctagccccgcggccgccgccagcagcatccctgacgctgccctctattgcgggaggtacatcgccagccgtggcggcatcgcctaggcagcagcaccagggtgaatgaccggcgggcggtggagcgcgtgcagcaggccggcggcgccgatgctgacgcctgctccccccgcgggcatctgcgtgaggttgagggtaatggtggggaatggcacagagacggagagcgtcaccatggtgaacggcatggaggtggagagcatcgccatggtgaggaacgggaggtcgcctccccaacaagcgctgacggcggggttacgcgccagccagtccctgaggaggccattggcggcagcgaggagggaggagggcgcagagagttgcgtgcccatccatagctcggtgtaagggcgggccaggttggggtcgttggcgtcggcttggtgcatgtctcaaatatgtgtaaaattgtaatggcacggttccaaatacttgaatactagtggcatatttcaaaactagcatattttcaatggtatggatctaattaaccctttaatctatgtgccttgtgcccaaataaaaacaatgtgctttgccttgatcttagatacataaatagaaaaaaaggataactttcttgagaaaacccctaatgccagtcatttctttccattcaccggattgagatcaaaggtctacataggattagacgaaaaactctcattagctcagcttggctcgttttgttttgtaacgagcggaactcatgttttagttcgtttcaggtaacgagtcaacttgagctactcacgagctagaacgagccaaggctagcaaaggcaacccaactcgcgagcggctaggcctagcacaacccaataaagcagaaccaataaggcgtggcacaactccctattatggcaatccctaataggctcccagccaccacccgctctcagtgtctcgttgtgtgactccatttagtacatataccaaaccctaccatctcctacttctagcagccgccaccgtcccacactttttgcttcaagcgcatcgccttcaagaaccaccgttcaccatggttgaaacccgaacttcggtgtggtacttgcccccaccctcctccgtcgtctccgatagctctcgaggctcagtagccaccaactgaacaaccaagattcccacttcccacccacctcttccgtctcccaccgtcaaattcaccacttgctcaccatcggtcaccgccacttaaccacttggccaagattcccccgtagatgccaccaccactcgcggccctactccatcactgcagatcctatggcaccatcaccaccacacactatgagttcactgtctcctcgatctctttctatgccaaggaactcacccatctttcccgtcacctaccctccctcctaccttaggatcgccaccacttcgccagagttcactaaggttgttgaggtggagaaagaagctcactaaatttagtgaaattaatttggtattatagatgttgctaatatttttctataaacttgatcaaacctgaagaattttaattaagaaaaagtcaaatgacacagaacaaacataggaattgaagacacgacaaatccataaggtgagaccttgtgttaatttttactcaaaatccttatgaaatggtccattctgtaatattttcaaaggaattttgagggttcgatcaaaatccttcacttttcctttgttccaaaggagccctaatattctgttgcagagcaaagtggttctctaaattaataccaggacatcgttcaccaatctacagctcatttaaatatgtttgtagatttgagaaatttacttaagtagagaatgatttatattttgtgatggaagaataattaaggtggatggacatatatttcaaatacaaactgtcaaagactattgataacctatataacaaaaaaccgtgcgatgatgcacacacatcaaacttgtcatcattgccaatatttatactaagccatagcataatatgaagatttactgacaatcaacggaaacgactggatccaaaaaaaaaatggcgtgctacttctttgagttcaaagaggcaaaagactcaaactagtactccgtatatacacaagcaagcaggtgaacgacacacaatgctcagttgcacgtatatacacaagcaagcaggtgaaccacacacaatcctcaccttccacgactcacacaacctacaagacagcaggcagcagcgcaaaggcatgtgaaacaaggagacatggggcatggtgaccactatgagcatatatattgaatacaagaatttacatggatcatttgtttttcttttgttatattagcaaacacataagaacgcacactctaggggatttgacatgaaaagtaccacagttgtgacagaagtcgcgtgggacgagaagctaaataccgattatgcttggattctctcgtggagatttatacttcttcactaccactgctgctactgttttttcgaacattgaacttgcataggggacaagtcgcattgatgtgcagccatttatcaatgcagacacagtggaaatggtgcccacaagggagctcacgcagctctgcaccatcatcatacgctgacaggcaaatgcagcactcctgcaccgatcaattggatggtgaagtcatttatcataaaatataagggatggctgggtgcaacaggactaagagacttagattataaccataacgggtgaacaagaaaaatgttccatgatgcaacaatccaagaaatcacttagagaaacaatatcagtatgaagaaactttgaggccaaaaaaatgaggtagttaaaccacctcttttatttgctaaataaccaatacaaaggctacagatgtatttggtctgaaggtccaaatgtacagagttgggcaattgtaagctcaaactcatgagtttattctttccaacttaagctctaaatttcccttaataagaaacaactaagtgagtttacaattaaaaagtggctcatgactctacagcatagggtttgcattgcctcctgaatactggcaattcctcatattctagtacggaaatttcaaatattgcatttaccccagtaatgggactggatacgagccactttttttcaccgggaaattatgagccactttttcccttctcaggtcaattttgtgttacaaatgagttcaatcacctacttcttccccagtataactagtagtggttttggaactttgctagtgggaaactttgatggtttgctaagcatgctgcaactagtatgacaaactgtgatgtgccaactgtgccaaacagtcaaacacagttagatgcctaattttgtagaaattgatcaaatcaggatgaatcagacttgattaaacagtcaataaagtacactcagaaattgttgatataaga
